United States Patent Application Publication US 2025/0188405 A1 - sequence listing, part 3

SEQ ID NO: 2 - DNA, 2912557 bp, Cupriavidus necator (residues 1-1,456,279 of 2,912,557)
  source 1..2912557: mol_type = genomic DNA
gatctttcgtttccgcgatgaagccgaggtgatccgcgacgccaacgacaccccgttcggcctcgctgcttacttctactccagcgacatccgccgcatctggcgcgtggcgcaggcgctggagaccggcatggtcggcatcaacgagggcgcgatcgcggccgaggcggcgccgttcggcggcgtcaaggaatccggctacgggcgcgaaggctcgcgccacgggctggacgactacatgcataccaagtacctttgccagggtcagctcggctgaagcgccgggcccatcgatcatcgaaccggaacacaccatgcccgcaaacaatcccttcaagactgcgctggccgcccgccaggcgcagatcggcctgtggctgtcgatggcaacgccatacctggccgaagtgtccgccaccgcaggctttgactggctgctgatcgacggcgaacacgcccccaacgacctgcgctcgacgctgcacgcgctgcaggcggtggcgccatacccggtccagcccgtggtgcgtgccgtcgccggtgaagtgccgctgatcaagcagttgctcgacatcggcgtgcgcagcctgctcgtgccgatggtggataccgcggaacaggcgcgcatggtggtcagcgctacgcgctaccccccgcaaggcatccgcggcgtgggcagcgcgattgcgcgcgcctcgcagtggagcgcccgcaccgactacctcgatgtggccgacgatgaagtctgcctgctggtgcaggccgaaaccgtcaccgcattgcagaacctggaagcaatctgcgcggtggatggtatcgacggcgtctttatcggcccggccgacctggctgcgtcgatgggccaccgcggccgccccggtcacccggaggtgcaggccgccatcgaaggcgcgatgcgcaccatcattgccagcggcaaggccgccggcacgctgacgtcggacccggcactggcacgccgctacctggacctgggctgcaccttcgtggccacgggcgtggacgtgatgctgtatgccaacgccgcgcgcaagcttgccgcatcgttccgcgagcagccctctgacgctcccgccgcagacaagccttccgccgcgtactgacccgtatctccttcgccttacacccatgccagccgaaaccccgaccccgaacaccaccttgcgcgcgatgcaggccatcgttggtgcaagcgcctgccgcagcggcgacgccgacacgcaggcctacgtcaccgactaccgcggcatctaccgcggccaggcccaggtagtggtgctgccgtcatcgacggaagaggtcagccaggtgctgcagtggtgccatgcccggcgtgtgccggtggtgccgcagggcggcaatacctcgctgatgggcggcgccgtgccggacgacagcggcaccgccgtggtcgtcaacctcagccgcatgaaccgcgtgctggacctcgacaccatcaacgacaccatgaccgtgcagtccggcgtcacgctgagcgcggcgcgcagcgccgccgaggcctggcaacgcctgttcccgctgcgcatcggctccgaaggctcatgccagatcggcggcaacctgtcgaccaatgccggcggcaccgcggtgctgcgctacggcaatatgcgcgacctcgtgctcggcatcgaggtggtgctgcccgatggccgcatctactcatcgctgcgcggcctgcgcaaggacaacaccggctacgacctcaagcagctgttcgtcggcgcggaaggtacgctcggcatcatcaccggcgccgtgctcaagctgatgccgcagccgcgcagcagcgccgtggcctttgtcgccgtacaggaccccgccgcggccgtggccttgctgggtgaagccaagcgcctgtccggccaggccgtgaccgcgttcgagctgatctcgcggcccgcgctggaactggtgcttgaatatcttggcaacgtggcttcgccgctgcaggacaagcacgagtggatggtgctgatcgaactcacctccgggaccgatgcggaaagcctcaacgccacgctgatggaaatcctcgaatccggcttcagccagggcctggtgcaggacgccgcagtggccgccagcctgtccgacgcccagactttctggcgcatccgcgaagagatctccgacgcccagacccgcaccggcggcagcatcaagtgcgatgtctcggtgccgctgtcgcgcatcgctacgtttgtggaggaagcctcggccagggtgctggagctggtgccggacgcgcgcatggtgatctacggccatatgggcgacggcaatgtgcacttcaacccgctgcgacccagggatcagccaggaaaagagttcctggcgcagtggtatgagcgggtctcggcactggtcgacggcatggcccatgcggaaaacggctcgatctcggccgagcacggcatcggcgtggccaagcgcgacgacctgacgcgctacaagtcccaggtggaactggagctgatgtggcaggtgaagcaggcgcttgatccgttgaacctgctgaatccgggcaaggtgctgccgacgccggcccgatagctcaccgctattccacaccacggaacgcgggcagggcgcgcgtagcaggaatcgcccatctgggctaaggtgtcagctatccagaacgcgcggagccggggcattgccgcaccggccaacgcgcacagcacggccggcccaccggcccagataccgatgagcgcccaatcccccgacatcgccctcgcagccgcccccatctccctcgaaaagcccgagctcgactacccctgtggcgacgcgcccgaacccggccgtgcccgcgaggtagcgcccggtgtgctgtggctgcgcatgccgatgccactgggcctgaaccacatcaacctgtgggccatccgcgacggcagcggctgggccgccgtcgacgccgggttgcagaccccggaaaccgcccaggcctggcgcgcgctgttcgccgcaagcggcccgctcgcgggcggcctgacgcgcctgttcgtgacccatatgcaccccgaccacatcggcatggccgggtggctgaccggcaagttcgactgccagctgtggatgacgcggctggaatacctgatgtgccgcgtgctggcggcggatacggggcgagcggcgcccgatgacgcgatcgagttctatcgcaaggccggctgggacgacgaagcgatcgaggtgtaccgcacccgcttcggcggcttcggcaaatatgtccacgccttgcccgagagcttccaccgcctgtccgatgccgacaccgtgcgcatcggcgcgcacgactggcaggtcatcgtcggcaccggccattcgcccgaacatgcctgcctgtactgcccggcgctgaagctgctggtgtcaggcgaccaggtgctgccgcgcatttcctccaacgtatcggtgttcccgaccgagcccgatgccgatccgatgcaggactggctggcctcgctggacaaggtgcgcgctgccgtgccggacgatgtgatggtgctgccggcgcataacgaaccgttccgtgggctgcatgcgcggattgactatctgcgggcgagccagatgcaggcgctggaccgcttgcgtggcgcgttggggacgccgaagcgggcggtggatgtgtttggtgagttgttctcgcgccccatcaccggaagcggcgggctgttggggatggctaccggcgagagcattgcgcacctgaactacctgctggagcggggcgaggcggtgcgtgagaccggtcccgatggctgccactggtaccgcatgaggtaatccccaggcggcggggactgccgcgtcgccttgacttccactcgtacgatatatatcgtaagatatgttttacgacatatcggaggcagtcatgcgccatcattcccacccttttggctcctcaggccacggccgtcacctgctgatgcgccttttgcctcactttgagcgccacttcgcccaccacgccatgggccgccacggcggcggcttctggggcggcgggcatgacgacggcttcggccctgccggcgccgatggtcccggcagcttcgacggcgaaggctggcgccggggccgcaagttcagcgccgatgacctgcagttgctgctgctggcgatgctcgaagagaagccgagccacggctacgaactgatcaaggcgatcgagacccgtaccaacggcttctacaagccgagtcccggcgtggtctatccggccctgacttacctggaagaagtcggctacgccaccgtcgatacggaaggcaacaagaagcgctaccagctgtccgagaccggcaaggcccacctggcggccaaccgcgagcgggtcgaggtgatgattgccaagctgcgccacgtggcgcgcaaggttgagtggatgcggcgcgccatgagcggtgagccgcagcccgagccggagcagggcggctggctgcccgagctgatgcaagcccgcgccgcgatcaagcgtgccattgcgctgcgcagcgatgcgggcgccgacgagcagcgccgcatcgcggagatcctgctgcgcgcggcggccgagatcgaagcggtgcgcaaggcctgacatgtggcactgacgctggctgcggccatcggcaacctgacccggcaggtgccgggttctatcccaaggaattccaatatgagtgagaacaatcaagcctccgcacgcgacctgactgtgcagcgcgtgcgccatccgctcaagatgcgcctgctgcaagtggtgcgcaccacgcaagtgtcaccgcagttgctgcgtgtcacgcttggcggcgctgatctgcaggactttgtctcggcgtcgttcgacgaccacgtcaaggtcttcttcccggtggacggcgctgacaagccggtgctgccgcaggtcaccccggacggcatcaccttccccgaaggccagccgcggccgcccgcgcgcgactacacgccgcgccgctacgatggggcgaagcaggagctggatatcgagttcgtgctgcatggcgatggccccgcgtcgacctgggccgcgcaggcgcagccgggccagtacctgggcgtgggcgggccgcgcggctcgttcgtggtgcccacggcgttcgactggcacctgctgatcggcgacgataccgcgctgccggcgatcgcccggcgcctggaagagctcggggccgatacgcgcgccatcgtggtggtggaagtgggcaatgccgcgtcgcagattcctctgccgacgcaggcgcaatgcgatgtgcactggctgcatcgtgacgatgcgctggaaggcagcctgctggaaggggtgctacgcaagctcacgctgccgcgcggcgagggttatgtgtgggccgctggtgaagccgcggcgatgaaagcggtgcgccagtacctggtcagcgaacgcggtgtcgacaagcgccgtatccgcgcgtcggcgtactggaagcgtggcgcttcggcggtgcatgagacgctggacgactgaagcgggcggggtgccggtaagatagtgcgaccgccatccgccagggagaccctgccgtgcagccttcgcccacctttcgccgcttcacgatcagccggcgcttcgcgctggcctgcgcctgcgcagcgttgctggcggcctgtgcgccggactccgtgcgcaatatccaggccaagggcttcaatgcctatctcgattcgctgcagaccgcttgccccaacatggtggttggctccagcaatatcagcgactggctgcgcaccagtggcagcaggggcgacgacaactacgtctactggctggaccagacctcgcggctctactaccagcgcatctcgccaacgcagtatcgggattcggtcagcgcggcgcttggcggcaagtcagattcgcgcgcgctggactgcatcgtgcgcaacctgccgccggaccggccgacgcgtccgccgggcggcaagctgctttgatctttcgcgcggcctcacgtgaccgttgtgcattcgccgcatccccgctaacatgagtctccggcagccgagacaacggctgccgacgtcgctcggacggttccgggcgcttacgtaaaggacttcctccatgactgccgcttctggcaagcgccgctttgcgcgcatcgatcgccttcccccgtacgttttcaatatcaccgccgagctgaagatggccgcccgccgccgtggcgaggacatcatcgacatgagcatgggcaaccccgatggcgccacgccggcgcatatcgtggccaagctcacggaagcggcgcaacggcccgatacgcacggctattcggcctccaagggcatcccgcggctgcgccgcgcgatcgcgcactggtaccgcgaacgctatgacgtggagattgacccggataccgaggccatcgtcaccatcgggtccaaggaaggcctggcgcacttgatgctggccacgctggaccgcggcgacacggtgctggtgcccgatcccagctaccccatccatatctacggcgcggtcattgccggcgcggatatccgctcggtgccgctggtgccgggcatcgatttctttgccgagctggagcgcgccatccgcggcagctatcccaagccgaagatgatcgtgctgggctttccgtccaaccccaccgcgcaatgcgtggagctggacttcttcgagcgcgtgattgcgctggcacgcaagcacgacatcttcgtggtgcacgacctggcctatgccgacatcgtgttcgatggctggaaggcgccgtcgatcatgcaggtgccgggcgccaaggacatcgcggtggagttcttcacgctgtccaagagctacaacatggcgggctggcgcgtgggcttcatggtgggcaacccggacctggtggcggcgctgacgcgcatcaagagctatcacgactacggcaccttcacgccgctgcagatcgcggccattgccgcgctggagggcgaccagcaatgcgtcagcgagatcgccgcgcagtaccagtcgcgccgtgacgtgctggcgcgcgggctgatcgaagcaggctggccggtggagatcccgaaggcgtcgatgtatatctgggcgcggattcccgagccgtaccgcgcgctgggctcgctggaattctccaagcagctgctggccaaggccaaggtatcggtctcgccgggcatcggctttggcgactatggcgacgagtatgtgcgctttgccctgatcgagaacgaatcgcgcatccggcaggcggtgcggggcatcaaggcgatgttccgggccgacgggctggtcaagccggcatcaaccgcgcaggcatgaaccagcgctgcgctcagtagcggcgcagcgcctccaggtcaagcacatgcaccacgctgtgcttgaccgccagcaagccttcatcctccagcaccttgagcgccgcattagcccgctggcgcgagatgcccgccagcaggccgacttcttcctgcgtcagatgcaacgccgggcccggtccggaagggcatagcacgggatggaatagcgtagccagcgcccgcgccacgcgtccttcgatgccgtgcagccgctcatgctctacggtggcgataaacaggcccagcctttcattgagctggtcgagcagatagcggttgaagggaaggctggtctcctgcagccagcggaacgtcgcccccggcatgcaggcgatgcgtgaatcgcgcagggccactacgtcatagcgcagcgcctcgcgcttgagcagggagccttcaccgagccagccaccggccggcacgccggtcagcgtcgcgcgcttgcccgagggcgatgcgcaatgcaccttgaccaggccttgtgcgatgccaagccagcagtcggccaggtcgcccttgcggatgacataggcgccttgcggcaccgcgcgctcacgcagttcggcgcgcacgcgctggcgttgctccggggtcagtgccgccgcccaggggctgcgcgccagcagcgcgtcgaggctcacggtggtgcatccgctcaggcgggcaggggcagcggctgttcgcccggtgcccaccacggccggaacagcgcctgcacggcgacgtcatcgacggcttcatagctggcgatgcgccagtgcggcgtgttgtccttgtcgacgatcagcgcgcgcacgccttcgatgaagtccccctgcgagaacgtgttgaccaccaccgccagttccatgcggaagcagtcggccaggtccatgcggcgaccgcgcagcagcagttcgcgcgtggcgtaggcggacagcggcgagcgggtgcgcagcacgtcgatggtgcgcgtggcccaggcggtgtaggccgggtcgtcctggcaggccagtccggccaggatctcgggcagcgtggcatgcgccgggaagtgctgcagcagcgccggcagcacctgcagcagcggcgcgtcggcggcgctggccaccggctcgcgcaccagcgcatggcgcaggtcagcgagcgcgtcatggccccaggcgatgccggcgagggtctgctccagcccggccagcgtggcgctgtccaccgcggcatcggccagcccgcacagcagcgcgtcggccgcgccgatggtgactccggtcagtcccaggtacagcgccagctgcaccggcagcttcgacaggaaatggctggcgcccacgtccggcaccaggccgataccggtttcgggcatggccacgcgcgagcgttcggtgacgatgcgcaggtgcgcggcctgcgccaggcccatgccgccgcccatgacgatgccgtccatcagcgccaccagcggcttgggatagcggtgcaggcggtaatccagcgtgtattcgtcgatgaagaagcgccggtgcagcggggtgccgtcgcggtagctgtcggtcagcgcgcggatgtcgccgccggcgcagaaggccttggggccggcgccgcgcagcaccactgcgcggacggcgtcatcccgcgcccaggcttccatctgcgcaccgagcgcgacgatcatcgggtacgacagggcattgagctggcgcggccggttcagcgtggcaatgccgacaccgttgacgacctggaacagcacctccggctcggcggcatccaggttggcggccttggtctcttcagtcaggcgcatggcgggctcctaggcgttgcgccattgcggcgttcgtttctcgaggaaagcgttgaccccctcgcgctggtcggcatcgtcgaacaggtcgacaaagcgctcgcgctccagcgccagcgcggcctggcgtggcacgccctggcgcgcaaggtgcaccagccgcttgctgtgcgcggcggcccggggactcacgttgcaggcgcgctcagccatcgccagcgcggtggcgatggcctggccgcgcggcacgacttcttccaccagcccgatgcgcaacgcggtggcggcatccacgcgctcgttggtcaggatcatgcgcttggcccagccttcgccgaccagccacggcagcgtctgcgtgccgcagccgcacggcagcaggccgaccgcggcttcaggcagggccatctgcgcgtgttcctcgacgatgcggatatcgcaggccagtgcgcattccagcccgccgcccatggcatagccgttgatcgcggcgatcaccacgggccgcgcgttctgcagggcctcgaaggcgctgccgaactgctgcgccatcacgcgggcatgggcgcggtcgccctcggcgaagccgttcaggtcggcgccggcgctgaagaacttctcgccggcaccggtgaccaccacggcgcgcacttcggggttggcgtcgatctttgccaccagctcgcgcaactgctgcaggccttccgcagtgaaggcgttggcgggcgggcggctcagcgtcagcgtggcgacgtggccgtgcagggcgaactcgatcattgcttgccctccttgtcggcggcggacaggtactggcggatcacgccggagaagtcgagctggccgtcgccggcatggctcacggcctggtagacctgctgcgccagcgcgcccaggaacagcggctgcttcacgctgcgcgcggcgtcgttggccaggcccaggtccttgagcatcaggtcggcgccaaagccgccggtgtagccgcgcccggccggtgcggcctcgatcacgccgggccaggggttgcaggtatccgaggcccagcagcggccggtggaggtattgacgatgccggccagcacattggcgtcgatgcccagcttgacgcccagcgccatcgcctcggatacgccgatcatggagatgccgaggatcaggttgttgcagatcttggcgacctggccggtgccggtgccgccgcagtggaccaggttgcgccccatgccggccagcaccgggcgcacctgggcgaacagtgcttcggtggcgccgaccatgaaggtcagcgtgccggcctgggcgccaacggtgccgccggagaccggtgcatcggccagcgcattgccgtgcgcctcggcggcagcggccagttcgcgcacggtggcggggtcgatggtgctggaatccaccagcggcacgcccgggcgcacgccggccagcacgccttccgggcccaggtaggcgctgcgcacatgggcagcggcgggcagcatggtgatgacaaagtctgcttcggccacggcctttcgggcggaatccgcggtggcggcgccctcggcgcacagcgacgccaccgccgcggcgttcaggtcgaatacggtcagcgtatggccggccttgagcaggttgcgcgccatgggcgcgcccatgttgccgaggccgatgaaggcgatatgcatggggtctccttccgtgtcgttcttgaatgccgcccgattacttcaggctgatggtggtgttcaccccatcgttgaccgtcgcgtcatcaaaccaccgcgccgtcaccgtcttggtctgcgtatagaactgcaccacctgcttgccgtacggacccaggtcgcccagcttggagccacgcgatccggtgaagctgaagtagggcaccggcaccgggatggggatgttgatgccgacctggcccacgtcgatctcgctctggaacttgcgcgccgcggcgccgctctgcgtgaacacgccggtgccgttgccgaacgggttgcggttgaccagggcgatggcctcgtccagcgtatcgacgccgatcaccaccagcaccggcccgaagatctcctcggtgtagatcgacatgtcggtccggacatcggtaaagatggtcgggccgatgaagttgccctgcggaaagcccggcacctccacgccgcggccatccagcaccagcgtcgcgccttcgcgctcgccggcggcgatgaggccgaggatccgttcctttgccgccaccgataccacggggccgacatcggtgcctgcttcagcgccggcgccgactttcagggtcttggcgcgttcgaccaggtcgggcacccagtcgcgtgccgcccccaccagcaccaccaccgaggtggccatgcaacgctggccggccgcgccgaagcctgcaccggccagcgcgttcagcgtctgctccttgtgcgcatcgggcagtaccacggcatgattcttcgcgcccatcatcgactgcacgcgcttgccgtgcgcgctggccaggttatagacatgggtgccaacggcggtcgagcccacgaacgacaccgccttgatgtccgggtgcgtgcacagcgcatcgaccacgtccttggcgccgtgcaccacgttcagcacgcccggcggcacgccggcttccagcgccagcttgaccagctccacggtggacagcgggtcctgctccgacggcttgagcacaaaggtattgccgcacacgatcgccatcgggaacatccacagcgggatcatcgccgggaagttgaacggggtgatacccgcgcacacgccaatcggctgctgcagcgtgtaggtgtcgacggtggcggccacgttctcggcaaagcccccttgctgcagggtgccgatcgaacaggcgtgttcgaccacctccagcccgcggaagatgtcgccctcggcatcggccagggtcttgccctgctcggcggtcaggatggcggcgatacgcttgctgtgctcgcggatcagggcctggaagcgcagcatgacgcgcagccgtgcgccgatgggcgtgtggcgccacgtggcaaaggcgcggtgtgcggcgcccacggcagcggcgacctcgcttgcagtggccagcggcacgcgtgccagcacttcctgcgtggcgggattgaccacgttgcggaattcggtggcggatgaatccacccattcgccgttgatcagcagcggcacggtcggcacggcattgtcggtcttgggcacggcactcatggttgtctccggaaggtctggttctgttggcaagggatgggggactacaggctgcgcgcgatcagcatgcgctggatctcgctggtgccttcgtagatctgggtgatgcgggcgtcgcggtagtggcgctcgaccgggtagtcttcgaggtagccgtagccgccgtggatctgcaacgccttggagcacacgcgctcggccagctcggacgcatacagcttggcctgcgaggcttcggacaggcacggcacgccttcgctgcgcatgcgcgcggcgcggtgcaccagcaggcgcgcggcgttcagctcggtggccatgtcggccagcatgttggcaatgggcgggtgttcacgcagtgcgcggccgaactggatgcgttcagatgcatagcgacatgcggcctcgaaggctgagcgtgcaatgccgattgcctgcgcggcgatgccgatgcgtccgccttccaggttggacagcgcaatgcgcaggccctcgccgggctcgcccagcagtgcgtcatgcggcacggtgcagtcttccagcgtgatcgcgcaggtgtccgaggcgcggatgccgagctttttctccggggcgtggacgataaagccgggggtgtttgtggggacaaggaaggccgagatgcccttcttgccgcgctcgggctcggtcgaggcgaacaccaccgccacaccggcgcgctggccgttggtgacgaactgcttgctgccgttgagcacccagccgttgtcggtgaagcgcgcgcgcgtgcgcaggttgtgcgcctcggagccggcctgcggctcggtcaggcagaacgcgccgatcagctcgccgctggccagccgcgccaggtagcgttctttctgcgcatcggtgccatagtgcaggaccggcccgcagccgaccgagttgtgcacgctcatcatcgtggcgcaggcggcgcagccggcggcaatttcttcgatggcgagcgcataggcgacgtagtcggtataggtgccgccccattcctcgggaacgatcatgcccagtagccccagcgcgcccatctcggcgacgacttcatcgggcaggcggccgtcgcggtcccattgcgcggcgcccactgccagccgttcgctggcaaaggcgcgcgcgctgtcgcggatcatggtttgctcttcggtgtagtcgctgtgcatggcagatgagggtgggggtttggagccgcgcggcaagtcaggcagaatgcgcgcttggcgtttgacctgcgggcagtgtaggaacgccggaggcgggctcctatgccaaaatccgccaatcttcgtgaactcgtttgccaccctccagcgccatggaaaaaggcagtgtcgccatctgtttcgtccaccacgccatcgcggggctgcgcgcgcgcggcatcgacccggatccggtgctgcgcggctctggcattgcgccggcgctgctggcggtgccgcagtcacgcgtatcggccgccagctacagcgagctgtggatggccgtggcggcggcgctggacgatgaattcttcgggcaggattcgcgcagcatgaagtgcggcagttttgccatgctgtgccacgcggtggcgggcagccgcaccctggggcaggggctggagcgcatcacgcggtacttccggctgctgctggacgatatcggcgtgcggctggagcgccacggcgacgaggccgcgctggtgctgaccgcgccctgcgcacacctggggcggcagcccggcgtgtttgccaaggaaaccatgctgatcatgctgcatggcctgatgagctggctgctgcggcggcgcgtgccggtgcggctggcggccttcgactacgacgagccgcagtacagcgcggaataccgcgtcatgtattcgcgccagctggcgttcgggcagccggccacggcgctggtcttcgacgcggcactgctggagcagccggtgcgccaggacgagcgcagcctgaaggccttcctgcgcgatgcgccgcacaacgtggtggtgaagtactccgaccgcgccagcgtgggcgcgcgcgtgcgcaggctgctgcgtaaccaacgcccggatcaatggcccacctttgaagatctggcgatcagcctgaacctgtcggcatcatcgctgcggcgccggctgatggaggagggcgtcagctaccaggacctgaaggacgcgctgcggcgcgatcttgccatcgaggcgctcagccattcgggccgcccggtcgcggatatcgcggccgagctcggctttgccgagccgggcgcgttccaccgggcgttccggcgctggaccggatcgcgcccgggggcataccgccgcgtggcggaaggttgatgcggcgcgtctacagctgtgccgcgtggtggcggatgtgatcggcgataaagctggtgatgaagtagtagccgtggtcgtagccgctgtgccggcgcagcgtcagcggctggccgacggcctggcaggctgccgcgaaggcttccggatgcagctggctttgcaggaactggtcgtccagtccctggtcgaccaggatgccggccgggaagggcgccccattctggcgtgccatcagttcactggcgtcgtactcagcccacgcggcgcggtccgtgccgaggtagccagtgaacgccttctcaccccacgggcagcgtgacggcgcggcgatcggcgcaaacgccgacaccgagcggaagcgctgcggatggcgctgcgccagcaccagcgcgccgtgcccgcccatggaatgcccgaagatgccgacgcggccggcatcgcccggcaaggcggtggtgaccagcccgaacagttcgtcggccacatagctttccatgcgccagtactcctgccacggcgcctcggtggcatcgacatagaacccggcacccacgccgaagtcccaggcatcggcctcgcccggcaggcccgctccgcgcgggctggtatcgggcgccaccagcatcaggccgtgctcggcggcaaagcgctgcgcaccggccttgatcatgaaggtttcctcggtgcaggtcaggccggccaggtagaacagcaccggcaccttgccgcctgcctgcgcctgcggcggcaggtagaccgagaaacgcatcggcagcccgatcgccgtcgaatcatggcgatagaagcgctgcacgccgccgtggcagccgtgttgcgagatcagttccatgtcggcgccgtcctcagtagagcaccacggagcggatcgactcgccgcgcttcatcaggtcgaagccctcgttgatgcgctccagcggcagcgtgtgcgtgatcaggtcgtcgatattgagcttgccttccatgtaccagtcgacgatcctgggcacatcggtgcgcccgcgcgcgccgccaaaggccgagcccttccactcgcgcccggtcaccagctggaacgggcgcgtcgagatctccgcgccggcctcggccacgccgatgatgatcgacttgccccagcccttgtggcagcactccagcgcctggcgcatgacctgcgtgttgccgatgcattcgaacgaatagtctgcaccgccgtcggtcagctggatgatgtggtcgaccacgttctccacgtccttcgggttgatgaagtgggtcatgccgaacttgcgcgccatggcttcgcggcccgggttcaggtccacgccgatgatcttgtcggcgcccaccatcttggccgcctggatcacgttcaggccgatgccgcccaggccaaacaccaccacgttggcgccggcttccaccttggcggtgaacagcaccgcgcccacgccggtggtgacgccgcagccgatgtagcagaccttgtcgaacggcgcatccgggcggatcttggccagcgcgatctccggcaccacgatgtggttggcgaaggtcgaggtgcccatgtagtggaagatcggcttgccgtcgatggaaaagcgcgaggtgccgtccggcatcaggcccttgccctgcgtggcgcggatcgcctggcacaggttggtcttgcgcgacaggcagaacttgcactggcggcattccggcgtgtacagcgggatcacgtggtcgccgggcttgagcgaggtcacgccggggccaacgtcggtgacgatgccggcgccctcatggcccaggattgccgggaagatgccttccgggtcggcgccggacagggtgtagtaatcggtatggcagatgccggtggccttgacttccaccagcacttccccggcgcgcgggccgtccaggtccacgtcttcaatggtcagcggggcgccggctttccaggcgatggcggctttggttttcatgggggagtcctccgggatcaggaatgtggggggtggcttgcaggctgcgcggcgcaggccggcgcggcgcggggcaagccaggtccgaggacatgactatacgatcttcctgcggctgcaggccagttttggccgatcagcggtcagcgaaactgcccaggcgggactcttacgccttcagcgctctcgcttccaggttccagagcttgcggtcgctggtggagacggccacagcgccttgtgcgagcgcgctgcggatatcatcccgattgcagacaaagcctgatgtcacgatcggcggcagcgccttgcggtccgcttctggcaggtgcgacagcatcggtgccggcatcagctgcaccaggttcgggtcgctctgttcgagcgccttgacgctgcgcggccaggtggagcggtcggtcacaaagaccttctgcatcgtcaccatgccggcgcggttggcgcgctggatcgttgccacgcgcgtggagaccagactggtcaccccgatgtcggccaggtactccaccccgcccttgtcctgcgacaagccttcgcagctgtcgatattgacgatgacgtacttgccggcgctggccagcgtggcgatgacgggctgcagcttgcgcagttccacgttggcgacaatgcagacttcggccacgctttcaaaaatggcgtcgatctggtcaacaccgtagagtgtgccgatgacggggtgtcgcgtcaggcgcgcaccgagggacctgtccatgctggttacttcggttcgttggtgagcacgtcactgagacccagcttgcctgggttcaggatattctgcgggtcgagtgcctgcttgaccgccgccagcagcgggaacgccgtgtccagcgacggggccatgtatggcgcgcgcaacagtccgattccgtggtggtggctcagtgccgcattgtattggatcagcaccgcattggcagcatcccatgcctggcgataccacttctggcggtcttccaccgcgacctcaccgcgcagcgagaagtacaggcaggcgccgtccacataggcgtgcgactggtgcgcggagccggcgagggtgcccggcacggcattgatggccttgaccacgtccgcgtagatggcagccaggtcgcgccacggtcccgacatttcgagcgtgtcggcgacaaagccggggctgcgcttgaagccctcggcgctcttgccggtcaggtagcgcgtgtcgagccagcgctcgaaaatggactcgctgtccagcttgtcaccaagttcctggcacacgcgctcgctgatcgtcatcaccgcatcgaccatctcgcgcgccccctcgtcggcaaccagcaggacgttggtgtccggcagcccgaactgcacgccactctccagttcgtcatagagccgcagcgccgcgggattggccccgcgctgcatgatttcgcggcaggcctccaggccgatggcaaaggtcttgaagccataggcgatggcgcgcccgtagtcgggcaggcggtgcagcttgaggcgcacgcgcacgatcacgcccagcatgccctcggacccgatgaacagttgctgcagatccgggcccaatgccgcgcgcgagtagccgcccacggtgacgaggctgccgtcggccagcaccacatccatgccgaacaccatgtcctcgatcttgccgtagcgcgtggacaactgaccggcgccgcggcaggctacccatccgccgaccgtgctgatcgcgtacgacgatggccagtggcccatcgtcatgccgaattccttctgcacggtctgttcgaaaatgtcgccgaacatgccggcttccacgtcgacgatctggctgtccttgtcgaatccgaccaactggttcaggccgcacacgtccagcacgatgccgccgcgcacgggcagggcggcgcccgtcacgttgctgcggccggccgatacggtgaccggaatggcactggcgctggcaatgcgcatgactgcctgcacctgttccacggtggaagcgcgcacgatgaccccgcgcggcgtggcgggcctgccggcggtctccgtgatcatcgatcctgcccaccagtcgcgcgtccacgccacgacgtcggcggtatcggtcaggacctcgtcggccaccttgcgcaaggccgcaatatcggccgcgcagacggcaatggtgtcgcgttgcaggcccggcgcatccggggtgccctggatgttcgccgcatagcccggcggcgtgtgggcgccgacgacgtagttgccgcggttgtagccgcgcttgatggcttccttgctgatcatgctgagtctcccatgaggacggatttttcgagggcgacggcggccaggtattcgctgacctgccgcgccacggccgcttcggacaatccgagttcggcctggaggatctggcccacccgcgctgcggcgcgggcggaggcatcgcgcgccatcaggcgggcgcggatgcgtcgtgacaagacgtcgtcaaccgtgccggccagttcatggcgcacggcgtagacgatttcggcttccgtatacggcaggccttcgacgatcggcctggcaagggtggcgtccgcctgcaggatgtcactgacaaagcgcgcctccgtgccatagcgctcgcccaggtgcgcggacatgccgccggatgcgacgatggcctgcgcgtcatagccagccgccccgagcagataggccgatctggtcaggcacttgctgcgcttgccgatgaccttctgcgccgcatcgatggtttgctcggccatgtgccgcgaggtcgtgagcttgccgccgacgatggtcaccaggccgtcgtccgcggtatgaatctcgtgattgcgcttgatttccagggtcttgccgccgggcggcgccaccagcgggcggcaccccgcgatgctgccgaccacgtcatccgccgtcaggtcggtctttagtgccgagcgcgcgccctccagcaggaagtcgagctcctgccgggtgcacatgacattgtcgaggtcgccctcatagtcttcgtcggtggtgccgaggtaggacacattgccccaccgcgtgatcgttgcccggcggctgcgcccgggcaccgggatcgtcaccgtgcagtcattgcggatcttcagccacgggatggcaacgtggacgcccttggcagggcgaatgtgcagggtcctggcctcgcccttcctgcggccggtccagtcgcgcagccagacgccggttgccatgatgaccacgcctgcgcgcacgcggatctcgcgctcgccggcgtggacaatggcgccatccaccttgccgtggccgtcgcgggtgatctcggcgacggtcgcgtgattgaccacggccgctccgtggaacgctgccgtgcgcgcgatgttcagtgtcaggcgggcatcatcgacgcgcgcatcgaagtacaggtagccgccggtcagatgttcctcattgaaggtcgggcagtgggacagcacctcggccttggtcagcttctggtgcaggattccctcgcgccagccaccagcgaggtcgtaggtccagagcaggctctcgaaggccttggcgaggcgcttgtcgaacacgccgttgcgctccatcaccgggaacaggaacggcagccgctgcaccaggtggcgcgcgttgcggcgcaggcgctggcgctccagcagtgaatggcgtaccaggccgagattgccctgctcgatatagcgcaggccgccgtgcaccatcttggatgacttggaagaggtccccgcggcgaagtcgcacttttcaaccagcgccacgcgatagccgcgcaagctggcatccagcgcggcgtaggcgcccgtcacgccgccgccgaccaccaggatgtcgaacgcatccgcctccaggcggtcgagcaggtcccggcgcaccagccgcaacggctcggtgctggtcatggcggcgcgctcgcggttagcgctgcgggatggaaaaatcaccatgtctgttattgctcctgattaatggaccgcaagcgcgtccgcatggttgagctcggatgccacccgcgcatgccagagcgcgcgccgctgggcgcgctcatcggcgctgatcgccggttcgaatactgcgtccggggtggtggtggtccgggcctgctgcatggaatcccaaagcaggccggacgagccggcaaggtaagcgatgccgcgcaggctggcgcggtcggtctccttcatgcggtggatggaaattccgctgagatccgcctgcatctgcagcagcgcatcgctgccggacaagccgccgccaaccacgagctccgacaccggcacgcccgcgatctcccggttggcctcgatgcaggaagtcaccgaatgcgcaatgccttcaaggatggcaaaggccatctcggcctgcgtcgttgccatcgagatgccggtcagtgcggcgcgcgcctcgggctgcatgcgtgggacgcgcaggccggtcagcgcgggaataaaggtcacgcctcgtgaagacgcaacggtgctggccagcgcactgatttgcctggcgttctcgaaccagccgagcttgtcgcagacccagttgagcgcggagccggtggtggcgacaaaggtttcgacggagaaatgcgacacgcccagttgccggcgcgcggtcatggtcagggtgctgtccgacttgccgctgcgggcaggaaggttcggaccgactaccaggtcgacgaagctgccggtgccatgcaggcacatcgcctggccggcatcgagacatcccaggccgattgcgccggcgagctggtccccggcacaagccaggatcggcacgtcaatccccagcacgtccggccgcgtgcggccgaagttgtccgcatcctggcgcagctcaggcagcagctcgcgcggaaagccaagcgcgtcgatccagtcgagctggtagcgatgcccggtcagtacataggcgttgcaggaagtggcgttggtcggcgtggtgatgcacgtgcgtgccgtcgacaggtgccaaagcagccagctgtcgatggtgccgaaggcgagctggcgcgcacggaaggcgtcagccacagccggcgtgtcgcgcaggtgccgcgccgcccataggtaaggcgagcgcacaccggtggggcggccgactgcttcgcgcagagtcgcgtcccatgccggcgcaagctgatccagatcggctgcgtatcgcgtgtcctgccacaccatggcgggtaccagcgcacgtccggtctgcgtgtcccacagtaccgcggtggcgcgctgggtcgcgatggcgagggcggtgacggtcaggttttcgcgggcagcctgtgccagggtggcgcggcaaactgccagggtcttgtcgagcaggacgtcggcgtcctgctcgaccacgccagggcagggcgaacggacctcaagcgtggtgtactcgaggcacatgacatgaccgtcagcggcgaccaccgctgcccgggtgcctgaggtgccctcatcgatcgcaaggatgacatttctgcgctgggtcatgggcgggccttctcaatcgcgggattcatgaaacccggagcgtccggcacatcgcccttgaactgcggggcatcggcttcattgtcggggttgatggtggtgcgggtcgggtcccagcggatcgcaaagcagatgatgctggccagcagcgggaccacagagagaatcaggaaggtggtttccagcccatactgtgcgcggaacagcgggaacaccagcaggcccagtgcagcgccgatggcgccgagcgcgccgatgatgccgttggcgcccgcgcgaagttcgctgcggaaggacagtgacgacaggcttttgccattcgcgccgggcccgcccgagtggaacaggatgaacagcgacggaaccaccactgccatccacatcggcatcttgccgttgaacaggcccaggatcagcagcatggcgaataccgccgcaaagccgaacgccgaggcgcggcgcaggcccagcttgcggcctatcaagggcgagaggaagccgccaaagatgccgcagacgttgaaaaccagcgcgccgatggtcgcgtagacaaagtccttgccgaacagggccgcactgatcagcggcaggtaccagccgatcgcgaagtactggatcgactgcccgatctgcacggtggccgccagcacggtgcgcggcaggtagacgccgcggaagatcagcagaacgttggccaggccgcggcgcgcctggttgaggacggggatgcgttccgcgggcggggcggcaacgaactcacgtccgtagatgcgcgtcatggcgtgtgcggcggcatcgagcaattccttgcgtgccagccagatcgggctttccaccaggaacaggccctgcagcagcaggatgaccacgccgaagaccgcggtggctgccaccgagtagcgccagatcgtatcgccaacgtcccaggagtagaacagcagtgccagcagcaggttggagcagacggccgtgtaccacatgccttgccacgtgttcagccgactcttgagtttcaccggcgtgaactccgccagcaccgccatggcgatggcaaagtcgatgccgtaggccgcgccgacaaagaagcgaccagccaggatcacctcgaagccgggggcaaacaccaccagcaatgcgccggccacggccaggaccttggcgagaaccagcgggcggacgcggccccagcggtcggccatccagccgccgatagggttgaaggcaatggccacccaggaggcaaacgaggtcaacagggcgacctttgcaggcgcgagttgaaggttgcgcgtcatcggcccgaggccggcgctcagcgcagaattggaaaacgcgtcaaggaatagcccgccgagtgcgagccaccagatgacaccggccctgccgcgaatgcccgggcaggaatctatgtaggcaatgacatcatcgatgccacgaatcttgatggcagagtgttgcacggcggtctcctcttatttgttctgtaagaggccgcagcaactgcaaggcgcgaagagaccatcttacagatggtctcttatctagatctgcgtgaccaatgtatggcttcgcaggcacagcgtcaaccgggaaaacccttgtcccgggcattagcgtgcagcggtatttcccactgcacggctgaggctggcatccggcggtcgcaactgcccctcatgccgccgccccagccaccagcccagccccgcccacaccagcgccagcacggcgccagccagcgccaccgtggcgggatggcccgacagcgcatcgatcgccgtcttgacccacgcactgaccgcatcgcccgcacggtagaccgcggtgtcaatcacgttcttggccttgtacttggtctcgggatcgaccacggtgaacagcatctcgcgcccggggcgcagcagcgcgtattcgcccacgcgccgcaggatcatcacgccggccagcacgccgaaggtcggcagcatcgccagcacgagaaagccgcaggtcaccgccagcggcaccgcggtcagcagcacggtgacgccatagcggcgcgcgatgcggccggtgaagaagagctggaccaggatggtcagcgcctgcacggtagcatccagcgcgctgaagacctgggtctggcgggtgcgctccgggaaggcctcggccaccagccgcgcctgctcgaaatacaggaaggtgctggccgtggccagcaggatcacgaacaggccgatgccaagcaggtagcgcgagcgcagcagcagcgacagcccggccagcagcccgccgccgatggggttggccggatcctgcgccgcgccggccggggcttcgcccggctgcaccacgcccgcgccggcgcggcggcgccagccgaacagccagcccacgcccggcagcgttgcggccagcagcgctgccgacagcagcatcagcccggtcaggccgatctgcggcaccagccagccgcccagcacggggccggccagcccgcccgcgctggcgccggcggccagcaatgcgaacagccggcgcgcctgctcggggcggaacacatcggccatcaggctccatgccacggacaccacgaacaggttgaacaccgacagccacacatagaacacgcgcgccagccagacgttgtcaggcagggcgcgagtggccagcgcaaagccaagcaggttggcgataaagaaggcgtacacccagggcacgaagcggcgccgcggcagccacgcgcagaccgcgccgtacagcgggatcgcggccagcatcacgacaaaggtggcggtgaacagccactgcaggttcttcacgccgccggcaatgcccatggtctcgcgcaccgggcgcagcatgaaatagctggcgaacaggcagaagaaaaacaggaagccggccaccacggcgccggtctcgccggggcggatgccgaagccgcgccgcagccgggccaggccgccggcaggcgcctcgcgcgcgggatcgtccacgatagattgccgctcagcgcagcagcgcggcgatgcgctcgcgctggccggggtcaggcatgcggcccagtccggcgccgaggttgtcggccatgttgggcggcttggaggtggccgggatcgccgcggtcacggcgggatggctgacgatgaacttcaggaacagctgggcccacgagccgcagtcgatatcgccggcccacggcggcagcggtcggtccttgacggcgcgaaagaggcgcccgtcctgaaatggccggttgatcagcaccgccacgccgcgtgcttcgcacagcggcagcagcgtgcgctcggcattgcgctcggccactgaatagttgatctggacaaagtccacgcgctcgctgcgcacgatattctccagtgcctcgtgcgcatcgtcgcggtagtgggtgacgcccaggtagcggatgcggccctgttccttcagctcgcgcagccagcgcaggttggcctgccagtcaatcaggttgtgtatctgcagcaggtcgaccttgtctacatgcaggtcggccagcgagcgcgcccattgcgcctgcgcgggcgcgccggacttggccgagatcttggtggccaggaacacccggctgcgggcgttggccgcgcgcagcaggtcgccggtcacggcctctgcgctgccgtagctgggcgcggtatcgacgaccgaaccttcgctctgcagcagcaggcccattacctccgccagcggcttgcgttcggcggcgccggtgccgacgttgaaggtgtcggcggtgcccatgccgatcacgggcagggcttcggtggtgcccgggatattgcggcgcaagggggcggcgacggtggcggcatgagccggcagcacagggccgaggccggtagcggccaggcctgctgcaaggctgaggaaggagcggcggtcgatcgacatgggatggttcccggcaagtcacttactggttgaccttaggcggtgggcggagccttgtaaaccgttgcgttgatcggttgcgcggcagacttcgccgttcagggcggggaatggcaaggcgcggctggatgcgctggtgagcgcggcctggcggggcgcggtggctccggacacaggcgaaaatgagccactaacgttaaatttcttgtggaatcaatcaggcaattcagattttcatgttttgtctcattttgagatttttaacatttattccttagtggcttgggtaaagttgcgcacgtatcaaaccgtgtgccgttacccagatcatgaatcgccgttgctaccgccttgtcttcaatcggtcacgcgccatgctgatggcggtcgaggaatcggcgagcggcctgggcaaggggcgcatcgccgggtcacgcggcacacaggctccggcgttcacccgcatggcgcgcttcggcctgccggcaacgaccctggccgcctggtgcgcaatggggctgccatgggcggccagcgcacaggtggtggcggacccgaacgcgggcgccaaccggcccgccgtggtccagaccgcgaacgggctgcagcaggtcaatatcacccggccgtccaccgccggcgtgtccgtcaacgcctacacccagttcgacgtccccaaggccggcatcatcctgaacaattcgccgtcgatcgtggctacccagcaggcggggtacgtcaacggcaacccgaacctgctgccgggcggctcggcccgcatcatcgtcaaccaggccaccggcacactgccgagccagttgcgcggctacctggaggttgccggacaagagctacgtcaccacccgcgtgctggtacccgagcaggacttgagttccggcacgctgaagctggcactgctccccggcgtcataggcgaactgcgcttcgccgagcccgacctgtggggcacccggaaatcggctttccccgcacccaggcgacttgctgaacctgcgcgaccttgagcaaggcctggagcaaatgaagcgtgtgccgagcccaggatgtggacatgcagatcgtgccgacgaaggcgccgggcgtgagcgacgtggtgatcgccgtcaaacgcggcaagccctggacggtggtggcctcggtggacaattccggcacgcgctcgaccggcaagtggcagggcaacctgagcgtgagtctggacaatccgctcggcctgaacgaccttttcaacgtcggctacaaccaggatctgggcttcgccaacaaggaacaggcacgcgtggctggaatggctattactcggtgaacaactatttccagcagatcgccggtgtcaatcagaccttcatctccagcggcaagtcggagacagcggacctgaagctgcaccgcgtgctcaaccgcagccagaacgatgtgttcggcatgcagtttcgcctgacccggcgctttggcaagagcttcatcgaggacaccgagatcgcgcagcagcgccgcaacaatacggtgctcgaggcgggcatcacggatcgccactacttcggcgcggcgcagttcgacggcacgctggcctatcgccagggcctcggcggattcggcgcgcaggacgatgtgttggccgacagtggcggccccacctggcgctatcggatgctcgtggcggacgccaacctgtcggtaccgttcaagctgggcgagctgccgctgcggtatgtcaccactttccacggccagttcaccaacgaccggctctactacattgatgcgctcaccatcggcagccgctacacggtgcgtggcttcgatggagagaacctgctggccagcgagcgcggcttctattggcgcaatgagctacatgcgcctctgggcggcagccgggcaggcgctgtatgcaggactcgattatggaagggtcttcgggccgattaccactgcgctggccggcacccaactgaccggggcggtgattggactacgcggagggctgggctcgcggctgggctcagtctcgtatgacgtgttcgtcggtatgccggtctataagcccgcagcgttccatacggccgcggtgacggctgggttgcaggtggtgtatcggtattgattcccgcaggacgaggcgtgacagtgcagaatcatcggcacaccaacagttggaaagcatccggttgtagcggggcgtacttcagcagcctgctagtgaagcttgggtcgatgcgccacacgaaaacgcactgacaagtcgtttagacgctgatccagtgtccatagccgtgcgcctggcgtgatcaaagtggaagccagcaatgagacatccaccaggccgcaaccgagtccatgcaatttctcgtgctcgatgaacgccattacctctgccaggctggcctgccttgcgggctgcaacagcccgatgtcaccgagtgtccgcgcacgcggtgccgggggcgtgccgcaggctagttcaaccaggaccatggggtgggtcaatgcttgatccgacacgagcaaactgaccagtgcgtcattgcggttcttgaaatgatccacccacacagaggtgtcgacgagcacgctcatttcgattcgggttccatgcggctacgtggcacatcttccatgtcgggcgcggtgccacccagcgccgcgaggcgcttggctgcttgcacccgcacgaaagtcttgattgcctcacgaaaaagatcagatttgtccatgccagggtcggctatctctagtgcttgttcataaagggcgtcatcgatagtgacggtcgtgcgcatagcatgctccctgcctcagatttgatgttatggtgcatcaaaaaaagcatctaggcaaggttgcccgcaggatggtgtgacggtgactgccccgtcacaccaacgcgccgctacagcatccgctcccgttcggctagcagtccatcaagctgcgccttcaccatgccaagcaggcaaagcgcgctgaagcagccctccgagcgttcgctttcgtgatccagaagtacgagaactccgtcgataccagcgcggacctgctgcaagcattcgttagtcatcttatcgatcgtcgttattgattcctcactggtgagtgcgcgccactcctttccacgtgagggcggcgggccagtcaacgagggtggaaagaccggtctgacgaggtggaaccggccagccttgcggctgcctcgcttggcccgccatggaaccatgcgagcacacaggcgttgcatgctgcaagcgcaacgcctgtcctcgtcaggcatccgggctttccacacccgatcatcggtgatccgatgacgccaccagtatttgctgtcggtgcaggggaatcgatgagagatgtcgcatttccaggggcgggcgaagtttgaatccatgcagcggatccggaaatcgccgactcttgaaaatgcacgtgcggctttcgtaaaccgcgcccatgccgtcgaaggcagtcacggccatgaagctgggatggcccgcgcaggcaagccaatcccggtggataccggggcctgccggggccgcccggcgcgcccccggggcgggggcgcgggaggtaacgctcagatcagcgtggccaggcccagcgtcagcagcagtgccaccacggagatgatggtttcgcagaccgaccaggtctggaaggtctgggtcacggtcatgttgaagtattccttgaccagccagaagccgccgtcgttcacgtgcgacaggatcagcgagccggcgccggtggtcagcaccagcagttccgggcgggtgcccggcacgctggcggcgatcggtgcgacgatgcccgcggcggtggtcatggccaccgtggccgagcccgtggcgatgcggatcatcaccgccaccagccagcccagcaccagcaccgacacgttggcgccggtggcgacgtcgacgatggcgttggagatgccggagtcgcgcaggatgcggccaaagccaccgccggcgccgaccaccagcgtgatgatggcggtgggcgccacgcactcgttggtgaacttgaggatggtctcgcggttgaagccgcgcgccttgccgaaggtgtagaagctcaccagcgcggcgatcagcagcgccatcaccgagttgccgatcagcttcaggaagtcgttggcaaaggtcttgggcgtggtgaacaggtcggcccagctgccgatcagcatcaggatcacgggcagcaggatggtgaacaccgtgatgccgaagcccggcaactcgtgcgatgccttgacgcgctcatcctcttcggtgaactggtccgccagcgggttgacctcgggcagcttgacgtagcggtccatcagcttggcgaacagcgggccggcgagggctgccgtgggaatgccaacgatcagcgcgtacatgatggtcttgccgatgtcggcgccataggcggtcaccgccagcagcgcggccgggtgcggcgggatcaggccgtgcaccacggacaggccggccaccatcgggatgccgaccagcaccatcgacgtgccggtgcgcttggccacgttgaaggcgatcggcaccagcagcacgaagcccacttcaaagaacaccggcaggccgacgataaaggcgatggtggccatcgcccaatgcacgttcttcgcgccgaagaaatcgatcagtgtgttcgcgatgcgctccgcgccgccggattcggccatcatcttgccgagcatggtgccaaggccgaccaccagcgcgatatggcccagcgtgccgccgacaccggcttcaaaggacttgacgatgtcgcccatcggcatgcccacggcaaagccgagcagcaccgatacgaccaccagggtaatgaaggggttgagcttgaagcgcgcgatcagcaccaccagtgcgatcactgcgatcagcgcatacaccaagagcgtggttccggtgacggcacccatatagtctccttgtgtggaaaaaatgccgcttgtggcggcaggggttagtttttagtttttcccctctcccgcggtagcgggagagggcacgcaatccgcaggcagcaggctcaggccgccggcttcttgtaggcgatgcagtccacttcgaccttgcagtccaccaccatgctcgactgcacgcaggcgcgcgcgggcgggttggcgccgaagtattccttgaagatcttgttgaacgaggcgaagtcgcgcgtgtcgtccagccagacgccgcagcgcaccacgtgctccgggccgtagccggcctcggccaggatggccagcacgttcttgatggcctggtgggtctggggcacgatgccgccgtcgatgacctcgccgctgaccatcggcacctggccggagacgtagagccagccgtcggccgcgaccgcgcgggcaaagggcatgtgctggccgccggtaccggtgccgccttcgacgccgaatcgtttgatgtccatgggtactcctgggatgggttggatatgggaaggaaggagggcagcgcgccggtcaggcggcgccgaactcaggccgcgagcctcgcggcaggaaccggccggcgcgcacgccggtggcctggcgctgctgccatgacagctcgccgttgacccagaccgcggcaatgccctcggccggttgcatgggatcggtaaagctggccgcatctcggatggtggtggcgtcgaacagcaccaggtcggcccagtagccttcacgcacgaagccgcgctcctgcagcccgaagcgctcggcggacatgccggtcatcttgttgacggccaccgtcagcgggaacagctcgcggtcgcgggcgtagtggcccagcacgcgcgggaaggcgccccacaggcgcggatgcggcagcgggtcgttgggcagcccgtccgacccgaccaccgtggccggatggctcaggatgcggtcgacgtcggcgtcttccatgcagtggtagaccgcgcccgcgggcatcagccggcgcgcggcttcgtgcaggtttacctgccattcggcggcgatatcggccagcaggcggccgcccatctcgggcgcgccttcggaccaggtcaccatgatgtcgaagtcgctggtgacctgcttcaggtccagcgtggaggagctggcggtgtaggggtagcagtcgcagcccaccggctgccagcgctgcgcaccgtcgagcgcgtccagcacctcggtgctgcggccccagttggccacgcccgcgcatttcaggtgcgagatcaccaccggcacgcgcgcatggcggccgatgcggaaggcctcatccatggcgtcgaggatctcggcgaactcgctgcgcaggtgggtggcgtagagcgcgccggccttggccagcggttcggccagcgccagcacctcatcggtcggcgcgctgaaggcgttggcgtaggccaggcccgtggacaggcccagcgcgccgtgctgcagcgcttcttccagctgcgcgcgcattgccgcgatttcttccggcgtggcggcgcggtcgaagcggtccatatggttgctgcgcagcgcggtatggccgaccagcgcggcaacgttgaccgcgggctgcgcggcttccaccgcatcgacgtaggacttgaaatccgggtagcggaaggcgtcggcatggccgagcaggttcatcgggtcgggcggctcgcccgccagcgtcaccggtgcggcgctgatgccgcagttgccgaccaccaccgtggtcacgccctgcgacagcttgggcgtcatcgcgggctggcgcaccacgttggtatcgtcgtgcgtatgcacgtcgacaaagcccggtgcaaggaccaggccgtcgccttcgactacatgcgaggcggcgtcgggatcgatcgcgccggcttcatcgatgcgggcgatgcggccgtcgcgcagggccacgtcggccaggcgtgcggcggcgccggagccgtcgatcagggtgacgcagcggatcagggtatcgaacaggtgtggcatggtcagtctccgagcggctggcggctgtcagggccccgggcggggccgctttcgccgcggtggctgtccagcacgtacttgagccggcgcaggcgctctttgctctggtccggctgcaacagcgcgcattgcgtggcgagcacgtccagcaccatcagcatggcgtagcgcgatgccgacggtttgaaaatgaaatccgtctccagcgtgcgcaccggcagcagcacgtcggcgcgcgcggccagtggcgagcccagcgcggtcacggccaccaggcgggcaccgtactcgcgcgcgatatcgcagctggccagcatctccggcacgcggccgctggccgagaaggccagcaccacgtcgtcgcggcccagcgtggccgccaccatcttctgtagcagcgcgtcctggtagctcgccaccggctggcccaggcgcgccaggcgatggcgggcctcgtcggccatgaacgacgagccgccgcccatgccaaaagcgtagaccatgcgtgcgccgagcaacaggcgcgcggcctgttcgatgcgctgcgcatccatcatgccgcggttgacttcgagcgcggtgaggatgtcggcgtggatgctgtcagcgagtgtggccggggtggcttcaccggcgggaacgctgccgggctgcaggaagcgcgcacccaccgcggtggcctgcgccaggcgcagcttcaggtcgcgcacgtcgcggcagccgatggccttggcaaagcgcgtcacgctggcctcgctgacgccggccttgcgcgccagctcattgatgctggcggcggccgcgccggccaggtcttccagtaccacctgcgccaccttctgctcggccaggcgcagcgcggggccgcgctcggcgatgcgggtcaggatgtcgaagggcgcagtcatgggcggcaggtctggtcggaagacgggtcggatcgaaatgtgacgaaaactgcggtgcttgcaggcaggggctataacagtgattggcgcacgtggcggatgccagtcgcgtggtcccggctagcccttccgggcatctgcgtgttactttataacaaggatgaaatatcttattttcagggctatcattacgtcaatcagattttttcagggtgatgacaagcatgcgtgaaataaagtatcaggctggcgtgatcgatccgctcaacaaggcgctgggacggatggagaccccgatcgccccggatgcggccggccagaccggctggaacctgttgcgggaagagctgagcctgccggccgcggtgctctatgaagaccggcttgcgcataacctggaatggatgcgccgcttcatgaacgaatacggcgtgcagcttgcgccgcatggcaagaccaccatggcgcccaagctgtttgcgcgccagcttggcgccggcgcgtggggcatcacgctggccaccgcgcaccagaccgctgccgcgcatgcgcacggcgtcaagcgcgtgctgatggccaaccagctggtgggccggcgcaatatggaaatcatcgctgacctgctgcgcgatccggatttcgaatttttcgcgctggtggactcggccgcgctggtcgaccagctcggcaagttcttccaggagcgcggccagaagctgcaggtgctgctggaactgggcgtggaaggcgggcgcaccggcgtacgcgacgacgcgcagcagcaggccgtgctggacgcgctggcgcgctggccgcaggcgctgtcgctggccggcgtcgagatctatgaaggcgtgctcaaggaagaagccgatatccgcaagttcctgcagcgcaccgtggcggtaacgcggcagctggcacaggaaggccgcttcggccgcagcccggtggtgatgtcgggcgcgggttcggcctggtacgacgtggtggccgaggaattcgcgcgcaccgagatcggcgcgccgatcgacatcgtgctgcgcccgggctgctacctgacgcatgacgtgggcatctaccgcgccgcgcagcagcgcatcctggccagcaacccggtcgcgcagaagatgcgcgagggcctgctgccggcgctgcagctgtgggcctatgtgcagtcgatccccgagccggaccgcgtcatcatcggcatgggcaagcgcgatgcggccttcgacgccggcatgccgatcccggcacggctgtaccggcctggcaccgaggcgccggtggacgtccccgcgcattgggaagtcaccggcatgatggaccagcacgcctacctgcaggtcaagcctggcgacgacgttcaggtcggcgacatgatcgccttcgatatctcgcacccgtgcctgactttcgacaagtggcgccatatcccggtgctggacagcgaaatgcgcgtgatcgacatcgtgcaaaccttcttctgaggcaggcagccccatgagcatcgatatcctggcctacggcgaaccgctggtggagttcaaccaacagcccgacgatccatcgcgctacctgcaaggctttggcggcgacacttccaacttctgcattgccgctgcgcgccagggcgccagcaccggctatatctgcgcggtcggtgccgacaccttcggcgagcgcctgcgcgcgctatggacgcaggagcgggtcgatacccgccacgtgcgcgtcgacccgagcgcgcctaccggggtctactttgtctcgcacgacaaccacggccaccgcttcgattacctgcgcgaaggctctgctgccagccgctaccagcacgagcatctgccgctgggcgcgatcgccgcggcgcgctacctgcacctgtcgggcatcagcctggccatcagcaccagcgcctgcgatgccgggctggacgcgatggagcatgcgcgcaaggccggcaccaaggtcacgctggacaccaacctgcggctgcggctgtggtcgctggcgcgcgcgcgcggcatcatgcgcgaggccctgatgctgaccgacgtgtgcctgcccagctgggatgacatcaccgtgctgaccgggttggacgaccgcgacgccatcgtcgactacctgctgggctgcggcatcggcctggtcgcgctgaagctgggcgaagagggctcctatgtggccacgccagagtcgcgcgcgctggtgccgccttatccggtcaagccggtcgatgccaccggggcgggcgactgcttcggcggcagctttgttgcgcgcctggccgcgggtgccgacccgttcgaggcggcgcgttatgccaacgtggctgccgcgctgtcgaccaccggttatggcgcggtggcgccgatccccgacgcccagaccgtgctgggccggctggcacagtcggtgtcggtgatcgcatgacccggttggcctgaactcctgcttccctgaaaccctgctcctgcactccctactccgagacagccatgcaaaaccagacttccccgctgcttcaacgccttgccgacgtgccggtgatcccggtgctggaattccactcggtcgacgaggccctgcacgtcagcgaggcactggtcaccggcggcttgccgctgcttgagatcacgctgcgtacgccggtggcactggaggcgatcaaggcggtggcggcagccttgccgcaggcctgcgtcggagccggcacggtgctgaacgtcgagcagctgcacgccgtgcgcgatgcgggcgcgcagtttgccgtctcgcccggcctgaccccggcgctggccgagggcgcgcagggcgcgggcatctcgctgctgccgggcgtggccaccgccagtgaggcgatggcggcgctggaagccggcttcaccttcctcaagttcttcccggcgcaggcagcgggcggcgtgccgatgctgaagtcgctgggcggcccgctgccgcagctgcgcttctgcccgaccggcggcatcgacgccgcgctggcgccgacctacctggcgctgccgaacgtggtgtgcgtgggcggttcgtgggtggtgcccaaggacgcggttgccagtggcgactggggccgcatccgcacgctggccgagcaggccagggcattgcgcaacaagcgctgagcagcggcagcgcaaagagaaacggcacgccatgcggcgtgccgttttcatatcgacgcggtccgggccgcatcagacttgggggggctggcggcttacttgtgacggtccgccgagctttcgagcttctggccaccgcgctgaatgtcctggccgagccccgccatcgtgttgcatccagccaacagtgtggcaaacaaaatgcaccagatccaacctttcttcacgccgggctcctttcgaggatttcaagaatcgagagattcagggattgagggatttgcgccgattttaccgctgctgtgagcgggtttgacatctggtatgtgccaatttgtaaatcgtgcatcgggcgcaacgccagccgcttctcaggcgtgggacgccagcagttcccgggcgcgctgctggattgccgcatgggtctggagcagccaggtcgcagggaatggctgcgccagcaggtagccctgcacgctgtggcagccccaggcacgcaccgcctcgagctgctggcgggtctcgatccccttggcgcagaccgacacgccggcgccccgggccagccggcaggcggcccgcaggctgtcggcacggttggcggaatcaccgggccggggggcatggcccagccggcgcgcgtccagcgtgacgcggtccgggtgcagcgccgccagcaactggcggcagcccgggctgtcgtcgaaatcgcccagcgtcagttgcagtccgcgccggcgcagggcggcaaagcgggcaatgatgtcggcgtcggccggcaccgcgctggccgacacttcgatgcacaggcggtccggtgcgatgccgcctgcgtcgatggcctgggccagtgcctccaccatctgcgggcggtgcagctgggcgctggaggccagcagggtgaattgcagcggggccacgttttcggcggcgcgtaccagcggcagcacgctttccagcagccagctgccaatccggccgaccagccccagcgactccaccgccggcaggaaatcctgcggcgccacccgcccgagcgccggatggtgccagcgcagccgcacggtgtagccgctgaccacggcgctggcgaagtcggcgcgcggctgcagctgcaggctcagttcgccgcgctccagtgcgtcgggcagggcggccagcaggggcgcggtcggtggcgcggcgggcttgtcggcgcgcgccaggccgtcgcctccccgtcgatcgacccgcagcatggcgtccagggcctgctgcaggctgcgttccgccgggatatccggatggtcggtggccacgccgatgctgcacgaaataaacagctcgaagccctccagcgcgaacggccgggacaggtcgtcggccagccggctggccaccgggccggggtcgggctcaccgtccggcagcgcggtaatgaccaccaggtctgccggcgccatccagtgcatgatggcggcgggcggcagcaggcaggcgatgcgtgcctgcacgatggcctgcagcctggccgcgcgccggggccccagggtttcgcaggcgctggcaaaccggtccaggcggatagaaaggatcgtcgctggctgcccggtgccggagcggcgtgccgctagcgcggacaccagggcggacggctgcatcgcgccaggcgcgcccgcggcgttgtcatcggcatcaggatgcatggatggtcttgcgggcagcctgttgaaggccgtgcgctgcccgcgtctccccggtatcagatttggtcgttcggcttgccgctgggacggccgccggcgcttgtcgtcaggccttggtaatccacgcctgccacggccgcatgcgggccgcacaggccgatcataagcgaaggggaaggtgcggaacattgcaaattgcgccaaggtgacttggtcgcaacctgcaacttgatatggatcaatatggccggaattggccgtgatcgtggattgacgccaccgccggaatccggcagcggcggatgggctggcctgatcagccggtggtctcttcctcaggtccttcctgcgggggcaggcgcgcggccagcactttgtcaatgcgtttgccgtccatgtcgacgatctcgaagcgccagtcgccccattgcacgctgtcggcgatctgcggcaggcggcccagcagcaggagcagcatgccggacagggtgtggtagcgctctttttcttcctcgggcacctggcgcaggccgatgcggtccttcagttccgggatcgggatcaggccgtcgagcagccacgagccgtcgtcgcgctgcaccgcccattcctcgccggcggcgtcggccttgaattcgccggtgatggcctcgatcaggtcctggagcgtgaccagacccagcacttcgccgtattcgtcgatgacaaaggccatctggccgccggagccgcggaaattctccagcagctccatgccggtcacgctctcgggcacgaacaccgccggctgcgccgcggccttcaggtcggcttcctcgccgcgcagccggcgcgccagcagctggcgcgcgctgaccacgccgatgatgtcgtgcatgccgccgcgcacgaccggaaagcgcgagtggtcggattcttcgatgcggtgcaggttttcatcgagcgtctcttccacgtccaagtacacgacatcgccgcgcggcaccatcagcgatgccagctggcggtcgtccagccggaacacgttgcgcaccatggtgtgctcgtgctgttcgatcacgccggcttcggaaccctcgaccagcagcgcgtggatttcttcctcggtcacgcccgggccgcggtcgaccttggtgccgagcacccgcagcaccagccgcgttgagctggacagcagcttgacgaacggggtggaggccaccgccagccagccgatcgggcgcgccaccagccgcgcgatggcttcgggggccatctggcccaggcgcttgggcaccagttcgcccagcacgatggaaaagtaggtcaggccggccaccacgatggcggttgccacatagccggaggtgttaggcgacaagccgaagccttgcagccagaggcccagcggctgcgccagcgtggattcgccgaccacgccgttgagcacgccgatcgacgtgatgccgatctgcaccgtggacaggaagcgcgtggggtcctcgcccagctggaccgcggcaatcgcgccgcggtcaccgttctcgatctggcgctgcagacgtgccttacgggccgtgaccagcgcgatctcggacatcgcgaacaggccgttgagcagaatgagcgccagtagtatggcaatttccatcagggtacgcgctctttgcgtgtgagttgaaagcaccaagcataccatccgcgcatgacggcccggcggttccccggtgcaggtgatggtggcgcctccgcctggcgtggcgataactaatggagatagctcgatacctaatattcaatagatagttatcgttggctgcgccagacttccgcccatggcagcacctgtgccgccttccgaacagcctggagcctacaggcgtgcgaatcacaaggagacagaatggaaagccaatggacggccgtgctggtggagaaattcggccatagcttcagcgcttacgaactggatggcggcgagcgccgcttcagtgtccagttgcctgactatccgcatgaattcgtggtggaccgcgagcgcctgtgcggctacgtcggccactatggcgtgcagaccttcgcgcacgccggcgacggcggcgccgcagtgatcgcggtcgacctgatgcgcggcgcagtgcgggcacggctcgattgctcgccctatcaccgtatccatggcctgcagatcgaccggcaaggacgcgtctacgcgctgagcgagcgcgacaatatgctggtggtgttcgaggcgccgctggagcaccccgtgcctgaccgcgccgtgcccgcgggcggggtgaaaagccatctgttcgtgttgtcggccgatggcgagcgtgcctacgtgaccaacctgctgtcgcataccgtgacactggtccacccctacgatgccacccgcgctccgcgcgcggcgtacgccggcaggcgccccgagggctgctgcctgagccgcgacgaagcggcgctctacgtcgccagccgcgacgatcacagtctgacccggctggacgcgcgcacgatggaagcggtgcgcacggtgccgaccggcgaggatcccacccgcatctactggtcgccggacgaccgcctgttcgtgctcaactacggcgagcgcagcatccgcgttttcgaccccgacacgctcgccgaaaccggccgggtcgacaccggcgccaggccgattgcgctcgccttccatccggctgacccgagccgcgcctatatcgcgctcaacgaccacaccgtcggccagcttgacctgcctggcctggccctgcgccatgccttcaccaccggcaaggaaccggacggtcttgccatcctggctttgccgacgcggtagtcaaccggcgttcacggccgcgaaggcagcgcggatgccagcggcccatacccggaaatccatacggagacagagtatgaaaggcttggaccaagccggcgccggcacgtcggtcgccatcgatgcgacaccactcaccggtgccgccagcattccagcccagcgctggtggcgcatcatcccgccgatcctgatggtctgcatcgtctcgtacatggatcgcgtcaatatcgccttcgcgatgccgggggggatgggcgatgcgctcggtatcggcgccagcatggccggcctggccggcggcatcttctttgtcggctatctgttcctgcagattcccggcggcaagctggccgtgcgcggcagcgggcgcaatttcatcgcctggtcgatgctggcctgggccgtcatttccgtgctgaccggcctggtgcgcaacgagaccgaactgctgattctgcgctttgcgctgggggtggccgagggcggcatgctgccggtggtgctgaccatggtcggcaactggtttcccgaccacgaacgcggacgcgccaacgccctggtgatcctgttcgtgccgatcgccggcgtcatcaccgcgccgctgtcgggcctggtaatcgcggcgctcgactggcgctggctgtttatcgtggaaggcctgatttcgctggcctgcctcggcgtgtggtggaagctggcctgtgaccggccggagcaggcgcgctggatttccgccgaagagaaggcttatctgctggcccgcctgcgcgaggaagagcagcaggcagccgccgctggcgcaagcgtggggcagggcgcggccgacacgcgggcggtattggcgcacatcctgtcgcaggacgtgatctggcgcctgatcgccgtcaattttctctaccagatggggatctacgggtacacgctgtggctgcccaccatcctgaggggcctgaccggaggcggcatggggcaggtcggcatgctggccgtgctgccgtacctgggcaccatggccggcatcctcgcgatctcctcgctgtccgaccgcaccggccggcgcaaggacttcgtggtctggccgctgctgggtttcgccgcctgcctggccggttcggtctggtggcacgacaatacctggctgtcctatggcctgctggtcggcagcggcttcttcctgcagtccgcggcgggggtcttctggaccctgccgccacggctgctggccgccgagcacgcgggcgtggcgcgcggcgtgattaatgcgctgggcaacctgggcggattctgcggtccctatgccgcgggcgtgctgatcgagcgcgtcagcgcgggcgccggtgtctacctgctggtcgccgcgctggtgatggccggcgccctggccgccacgctgccgaggcggtgccgatgagcagcgtaacaactgccgcgctgcccgcaggcctggccatcgtcgacgcccaccaccacctgtggcaactcgggcgcggccgctatccctggctgcaggacgaataccggccacagagcttctttctcggcgattaccaggccctgcgcagcgattaccttgaggcgcagtacgcgcatgacactagcgccgtcacagtgctggccactgtgcacgtagaggccgaacgcgaccgccgcgaagccgtcgacgagaccgcgtggctgcacggccaggcctggcgccccggcatggctgccgcggtggtggcctacgcgccgttcggcactccaggatgcgcggagctgctggcgcgccaggccggtttcgcgcgggtcagggggatccggtgcaaaccgctgacagccgcggcgcagggcgagtcagtggcagggcggcccgggtcgatgcaggaccaggcctggctggacgacctggcgcggctggagcgccatggcttgtcgtgggacctgcgggtaccgttctggcatttgcgcgaggcggcgcgggtggcggccgccttgccgggcgtgccgatcgcgctcaatcacgcgggcctgccactggaccgctcgaaggagggcctggccagttggcgcgccggcatggaggcgttggccgcctgcgccaatgtgtcggtcaagctgtcggagttcgggctggccggcgggcgctgggatgcgcagggcaaccgcggcatcgtgcgcgaggtgctggcgatattcgggcatgagcgggcgatgttcggcagcaacctgccagtgtcgggcctgagcgcggacttgggcacgatcctcggcacggtgtgcgaggcgctgccggatcccgtcgccaggcagcgcgtgctggctggcaatgcggccaggttctatcggatcaatgttccaaggccgtccgagctggcctagaaccagcggcaggcacaagcatgctataagtcctatcttcgccgcagcccggccaccatgccagacctcccagccaccctctccagtgccgccaccctgcgcaaacgcttgcatatgcggcatctgcgcctggccctggcccttgccgagcaccgctcgctgcggcgcgccgcggcacagatggcgctgtcccagccagccgtcaccaaggcattgcacgagctcgagagcgtggtcggcacgttgctgttcacgcggcatgcgcgcggcatcgagccgacggtgttcggcgaggcgctgatccgctatgcgcgcgtggtgctggccgacctggatgccctgcacgatgaatttgccgccatcgccgcgggcgaggtgggcaaggtgcggctcggctcgatcctggccccggtgccttccgttctgtcgggcgtcatcaacgcgctcaaggcacgctatccgcgtttgcatatcgtgatgcaggtcgataccagcgacgtactggtacaggcgctgcggcaggatgcgctggacgtggtgatcggacgcattcccgaaggcacggtggccgacgatctcgacttcgagccactgttcgaagagtcgctggccatcgtggcgcgcgccggccatccgcaggcaggcaagcgcggcgtcaagctggcttccctggccggctatccctggatcatcccgccagcggcggtgccgatgtggcagatcatcgaccagaccttccgcgacaaccgcgtgccgctgccggaagacatcatcgagacttcgtcgatcatgggcacgctgccgctgctggcggatagcgaccgcattgccgtcgtgccgggcgcgatcgcggagtacttcgtcgccctgggtgcgctggcggtcctgccggtggcgatgcgcgggcggctggtcccctatgggattgtgctgcgccggcggcgggccgcgacgccggccatgcgcctgctgatcgacgcggtgcgcgcggcggggcccggcgctccgcaggcgatgactgaattggagccattacctgcaaggtaatggtcatacgccgcggtgcatgctgtaatgcatgccatggacacgctgaccccagcctccgaggccaccctcgacttccccggcctgctgcgctactggcgcagcaagcgcggctacagccagctggcgctgtcgctggccgccggggtgtcgcagcgccacatctccttcctggaatccggccgcgcccgccccagccgtgaaatggtgctggcgctggccgagcgcctgggcgtgccgctgcgccagcgcaaccggctgctgctggccggcggctttgccccggcctacagcgaacacgcgctggcttcgccgccgctgcagatggtgcagcaggcgatcgcgctgatcctggccaagcaggagccgtacccggccgtggtgctggaccgtttctggaacctggtggatgccaacccggcctaccggcgcatgctcgagaccctgctgggcgggcgcgagccggcatcgctcacggaaggcagccacaggatcaacctgatgctgaccgtgtttgatccggagggcctgtggccggtgatcgagaacgcgcgccaggtcgggcgctacctgttgcggcgcgtgtggcaggagctgcaggtgcaggcccacgaccagaccgcgcgcgagatcttcgggcgcatcgccgcctggcatcctgacatggtcgggccgggcggcgcgctgctgcccgaggacgacggcaccgatggcccgccggcgccattgctgccggtggtgctgcatgcgggcgcgttccgcgcgtcgctgttctcgaccctgaccacgctcggcattccacaggacatcacgctgcaggagctgcgcatcgagtgcttcttcccggctgacgacgccacccgcaccttgtttgaagcgcaggccggggctgcagcggccgctgtcagaagcggtagcgcaggtaaatgacgtggaaggtagtgccgggattggggtccttgatgccgccattggacaggtgctggaaccggtagcccgcggcaaagcgccggtccttgcccaccgtcaagccgatcccggcgtactccgagaactggaaggcggtggaaatgtcgtggttggccgaggtgtgcgtgctggtcagcaggcgcggcccgaccgacagctcgaggaagggcacccaggtgtggcgccaccatgcgatccgcaccaccggcgaggcaccaaactcccataggtcgttgggctggttgtcgctgctgctgcgccagcgcgcaatgttgacctcccattgcaggtcgacctgccagccttgcggattgccccacgcaaagcccgaatcccacaacatggcgacctccgccttctgcacgtcgtggccatcgtcgaagccgtagccaagctgcacggcaggcgcggcgcgtgccgtcgctgccaggcacaaggacagggcaagcaggcccgcggcgacggtgcggcgcacccgctgttgccacgcatgtcggcagggcgggggtggatggaacgaggaacaactcacacggcggtcttgtctggcttctggttcgtgtcggcgcatgggaagcacggatgaagaggtgctgcgttgttgtccggcaaggcatgagccggccgccacggcgggcgctagcttgcacatgcgctgcctccctgccttatttgtagtacacgcgaggccacgttgcgatggtcggatttgttcaagcgtggtcgagcgcccgtccggcgctctgcgtcgggacaaagaaaaaaataatcgtgctaacattcgcgcgccggcgccggctacaaggccgcgccggttcgttacgtcttcagggcggggtgaaagtccccaccggcggtatgccgcggcgcgcagtgcgtgtccggcgagcccgcgagcgctcgcattcccgtgcgaggtcagcagacctggtgagaggccagggccgacggtcatagtccggatgaaagaagatgggcggagcttgcccgcgcggcccggcgccttgcccgagccttgcggttcgctgttgccttgcgccgcgcgcagggcgcggctgttcgtgcgtgcgcttcaggcgcggcgtgcggcgctgcaactccgttgatccttcccctggaacgcccattgatgctgaacaaggagcgtttcatgcctagcctttccaccgaagctgttgcacccgaggtgtccgcggatcttgccgccgatgccgccccccgttccctggccgcgcgcatcgcgcaggcgctggacgccatgcgcgaaggccgtccggtcgtgctgctcgacgatgacgaccgcgagaacgaggccgacctgattctggccgcggaacgcctgacgaatgccaatatggcgatgatgatccgcgaatgcagcggcatcgtctgcctgtgcctgaccgaggacaaggtgcgcagcctcggcctgcggccgatggtcgagcacaaccgcagccagtatggcaccgccttcacggtatcgatcgaagcccgcgaaggtgtcggcacgggtgtcagcgccgccgaccgcatcaccaccatccgcgctgccattgccggggatgcgggcaccgatgctgtggtcagccccggccatgtgtttccgctggtggcgcgcgacggcggggtgctggtgcgccgcggccataccgagggctcggtcgacctggcccgcatggcaggcctgtcaccggccgcggtgctgtgcgagctgatgaaccccgacggcaccatggcacgccggccggaggcgctggcctttgccgagatgtaccagctaccggtgctgaccatcgaggacctggtggcctggcgccgcctgcacgactgaaaagtcgccgcctgcacgcaccccggcatgcaaacgcgcccgggatgcgtgcttcctgtgcgacaatgcggatcgctttttcccgtctatatgagggcaattccatgatgttccgcatttttaggcacgcagccgcgtttgctggctgcctgctcggactggccgcaccgctggcgcatgccgaaggcagcgccgcgacggcgccgtcccccgttccctccagcaccacccgcccggctgccgccgctggcctgtacgagtgccaggtcgctggcaccggcacggtattccggtccacgcccagggaaggctgccggctggtcgcggcacccgatcccgccgcccccgatccgcaacgatggcttcccctgatgggtgccaacggcgtgatttcgtatttcgatcaatccacggtgcgccgccagggcaccgaagtcggcgtggtggtgatgcgcaattcgccgtcgggggtgatccgcaccgccagcggcgagccgatccgctcgtcgctcaagcgcatggtgctgaactgcgccacgtccatgttcgccgtggtcgagcagacgctctacagcaagcgctttgcgcgcggcgattcgctctatacgatccgcgcgccgcagtacggcaccttccaggtcgccggccccggcacgattgccggagagttgctgcgcaagctgtgccggtaagcctggcggcgagcggcgatccacggctgcctgtccagctccctatcagggtttgtcccggtcaacggcgcgcaaaccttcctcgttgatgctggtgacagggcgcgagccaaaagcgcccgtcatggcaggcatccctgccatacctacccgcagggcaaacgaggagacggaaatgaagaaatggatcgtcatgctgtcgatggcaatgttcggtgcgggcgcgatggcgcagacgccggctactccggcgacgcctgccaccccggccacgccggcggcagcgtcgactgacaaggccgcgccggccaaggcagacagcagcaaggccaaggccaagaagaccggcagcaagaagaagagccacgcgcctgcggccaaggatccgacgaagaacaaaggcgcctgagcgcgctgatgatggcggcgggcgcacggctccccggcaagcggggaggcaggctgcgcccgtgactgccatgccgccacgcagataatggccggccgcgcctgcatggcgcggacccgccgtgcgcaggacagccccgcggcacgcgttgcgtgtcttccggggggatagagcagggcatgtccgggcggatcgcaaccaggaggcttcggcctcctttttttcgtccgctgccgcagggcggctgccgccgcgccggctttgcgcctgcgccgccgcacgctatgcttgcgggcatcgtgccggaccgggcgtggagccctcgcgccggcgcaggccaactcggacgggagcggtcttatggcaacgctagcggtgtggcggcggtggcggcgattgacggcattctggatggcgggactgggctgggtgataggcacgctgtggatgcaagccagcctggctgcgccggcgtccgagcccgcggccgtgccggctccgatcgccgtgcgcagcggcgctgcggtcgagctgcgcctgatggatcggcccatcgccaccatgcgcgccgagatcgcgggagccaccccggccatgcgcgtctcgcgcgcgcagctggtgttcgacgacctgacggaaagcgaactggcactgccgctcgggcaggccagcggcacgttcggcgatgcgccgatggtcgccttccggctgggcgaccggctcttgttcgcgctgacctcgcaagacctctccccggaggatcaccttacgcttgaggctgccgcaacgcgcaccgcggcgggcctgcgccaggccattgccgcgcggcgcgcgcacctgcactggcccaacctgctgcgcggcgccgcgctgagcctgcttggcctggccgtgctggccgcgctgacatggggcgtggcgcgagccggcgtggccctgcgcgctcgcctgcaggtggcactggagcgccacctggcgcggcgcgtcggcggccagttcgactggaccggcgcgctctaccacctggttgcccgcatcgtgcagatcctggcgatcgggctggtgctggtgctggcctttgcctggctggagtttgcgctcgagctgtttccgctgacccagcccatgggcgaccgcatgggcgcctttatcgtcggcttgctgtcgcagatcgcgctgtcgatggtgtcgtcggtgccgggcctggtcacggtggcggtgatcgtgctgattacccgcgcggtgcagcggctggtgtcgaatatcttcaaggcggtgcagaagggccagatcacggtgcccggcatgcatccggaaaccgcgggcgccacgcggcggctggcggcggtggtgatctgggcgctgggcttcacctttgcctacccctacatcccgggctcggacagcgatgtcttcaaggggctgtcagtgctgctgggcttcatggtgacgctgggatcggccaacgtggtcaaccagctgatgagcggcatggtggtggtgtattcgcgtgcgctgcggcgtggcgacatggtgtgcatcggcgatacggtgggcaccgtggcctcgctcgacgccctgtcggtgaaggtgatcaacctgcgcaatgaagaggtgacgctgcccaatgcggtggtggtcggcagtgccatccataactacacccggcacggcagcgtgcgtgatccccgcgtgcaggaaggctggcaggctgcgctgatctcgacttcggtcacgatcggctacgacacgccctggcggcaggtccatgcgatgctgctggcagccgccgccgaggcggcgcatattgcgccgtcgccgacgtcattcgtgctgcagcgggggctgtccgacttctacgtcgagtacgaactgttctgcgcgctggaccatccgcgcaatcgcttctacgcgctgtcggcactgcacgcggcgatccaggaccagttcaacacccacggggtgcagatcatgtcgccgcatttcatggcgcagccggacaagaccgtctacgtgcccgggaccaggtggtacgaggaacccgggtcgccgcaggtcgatccggcggcgcggccgcatcgcgcgccgtcgcgcgcggcatgaacgccggcggcgcgagcgctcagcgccgcttactcatcgacgtggcgcgacttccattgcccgttggactgcttgcagaaccagccgctccagtgctcttcagcgctgccgcgcttgaggtcagacttcaggcgccggcagggctggcccttgtcggtcttgctttcgaccggcgtgatggtgccgtcgatctgctggcgccgccccgccgccgggaacgtccattcaaccgtcttgccgtcggccgtatcgttcagtgcggtgcgcactgacttggccagcgatgcgccttccttgtcgttgagcgtgccgatgatggtgccgctcaggtagttgtcgaagtacgcctgcgccggtgccgcagcggcaaacagcagggcggcaccaagcgcgccagtgacggcggcgcgcagggcagggcggacagggctgacggtagggtcggatggccgaggcagcatgacgattccttgtggcttcgtggtggcgtttgggtggcattgtaagcgcaatgcagcgccgcagcggcgctgcggtgcggttgacacgtgccagccgctgacctagcgttgattgttgcccccgcgcttcgcgtcggccggcagcggcgcctgccgtgcgctttgcaaggcaagcgcctttcccccagcgagaggagatcccatgaagctgagctatctgaccatcggcctggccctggcctgcgcattcggcacgctgcacgcccagaccacgggcaaggccgacaaattcaatccttacactgacggcgccaagcaagacaagttcagtacctactccgatggcgccaagcaggacaaattcagcccgtactcggatggcgcaaaaagcgacaacgtgacttcgctgaacccgggtgcccgccctgaccagatggagccgatccagggcggcgcgcagaaatccttcgactcatatagccagggtggcatgaagagcgggaagttcgatccgtattccgaaggcgccaagagcggcaagttcgatccgtacagcgaaggcgctaaaaagtaacaccgtattaaaagggccggctgccggccggccccgatccgcaccagattctcgcagccgggaggcattcgcctcgccggagcttgcggccgcgtgatcccgacgcccgcaaagcctcgtccggagcggctttcaggcaacctggccaacattttgtttcaaaccttgcgtgatcgaaacgtgacttttgcgtctcgaattgttatggtttattgcgcatcgcaacaaaccggacacagtgccccgcgggccgtctgcctcgtgtccgggcctcgccactcggcgccgggcccgtctcttgctgtgtcgtccttcgttccgactgccgatgccggtcaccccgattcaaccgcttaccctggcatacatgtcacagatcgccacgccacgcctgtccattccccataccttgcccgccgccgggccgggggcccgccgccgggcggcgcgggcgggtgtgcggatcgcagcctggcttggtggcagcgcgctggcgctgtgtgccatggcagcccaggcgttcgatttcgacacggtggcggcgcgcgcgcgccagctggcagcctcgccttacaaggcgcccccgcagaacctgccgcgcgagttgcgcgagctgtcgtacgagcgctaccgcgagatcgaatacaagcccgagcgctttgcctggcgcggcacgcgcgtgccgttcgagctgtcattcttccacgagggcatggtgttcgaccagcccgtgcgcatccatgaagtggtgggcaacagcgtgcgtgaattccgcttcgacccgtccgcgttcaactacggcccgcacaaggtcgatgccggcaagctcaagggcctgggcttcgcgggcttccgcatcctgtatccgctgaaccagggcaagcgcaaggatgagctggcgtcgttcctgggcgcgagctatttccgtgcgctgggcaaggaccagtggtacggcttgtcggcacgcggcctggcggtggacaccgcgctcaattcgggcgaggagttcccgcgctttgttgagtactggatcgagcgtcccggccccaatgccaaggagatcacgatctacgcgctgatggattcgcgccgcatgagcggcgcgtaccgtttcaccatcaagcccggcgccgagaccgcgatggaggtcaagtcgcgcctctacctgcgcgagaacgtgaccaagctgggcctggcgccgctgaccagcatgttcctgttcggcgagaaccagccgtcgcccgcacaggatttccgtcccgaggtgcatgactctgacggcctgtcgatccacctgggcaccggcgaatgggtctggcgcccgctggtcaatcccaagcgcttgctggtcacctcgttcgcggcgaccaatccgcagggcttcgggctgatgcagcgcgaccgcaccttcaacagctaccaggagatcggatcgtggtatgagcgccggccgagtggctgggtgcagccgcgaggcaactggggctcgggccgggtagagctggtgctgatcccgacgccggacgagaccaacgacaatatcgtcgcgtactgggtgccggacaacccgcccaagccgaagcaacccttcgactatgagtaccggctgctgtggcagaaggacggcgaacaacaaccgccgctgtcgtgggtgacccagacccggttggggcagggccagacccgcaacaaggaagacacgagcttttcgctggtggtggacttcgaaggccctgccttcggcaagctgccggcgaacgtgcgcatcgacccggtagtttcggccgatgccaacggtgagctgctgaaaacgtcggtgcagcgcaatgaggcgaccggcggctggcgcatgaccatggtgatgcgccgcaaggacgaaaccaagccggttgagttgcgcggctatcttcgcaacggcaatacaaccctatccgagacatggagctacatcttacccccaggctaaagcagcgaccggccaaggcggcggcatgcgagcgctatgtcgaccgcctgccggtatcgcctgaagtgcgcagcgaactgctggcagacggcgcgcccgcgacgccggtcgcaccggtcacgcccgtggcatccgttgcccccgtgatcgccgttaccgccgacggccgcgatgcgcaggacgcgatcacgcgcctgcagtcgcgcctggcggccaaggacacgccgcccgcgcaaggcggcagtgcctacgcctctgtcggccggcgtttcacgatcgcatacggcaatccccaggtggatggcgcaccgctgctgcagcggcgcgaagacggcaccgtgaaggtcgacaccggccccgagcccgagcgcagctcgatggtgccgcgccaatggccgccgcatatcgtcaccggctggctgcgcaatacctggcgccgcatgctcggccgcccgcccgtgcccgagacctgggacacgctgcacgacggtcccgatgccgaaggcaaatggcatcccgccggctcgcaccgacgctggttcctgctgggcctggtcgtgatccagaccgtgctggccacctacttcatgagcaacgtgctgccataccacggcgccgatccgctcgagatcgccatcctggtgctgttcgccgtcctgttctcatgggtgtcggccggcttctggacggcaatgatgggcttcctggtgctggccaagggcggcgaccgccacctgatctcgcgctcggccgcgcccgacgggccgatagcgcccgaggcgcgcaccgcgatcatcatgccgatctgcaatgaggacgtgacgcgcgtgttcgcggggttgcgcgccacctatgaatcgctggcgcgcaccagccacctgtccaacttcgatttcatcgtgctgtcggacagtggcaatccggacctgcgcaccgccgagcatgacgcgtggatggagctgtgccgcgccgtcggcggctttggccgcatcttctaccgctggcgccgccaccgcgtgaagcgcaagaccggcaacgtggccgacttctgccgccgctggggcagcaagtaccgctacatggtggtactcgatgccgacagcgtgatgagcggcgactgcctggccacgctggtgcggctgatggaagccaaccccggcgcgggcatcatccagtccgcacccctggcagtgggtcgcgagaccctctacgcgcgcgtgcagcagttcgccacgcgcgtgtacgggccgctgttcacggccggcctgcattactggcagctgggtgaatcgcactactggggccataacgccatcatccgcgtgcatccgttcatcgagcactgcgcgctggcgccgttgcccggccgcggcccgctgtcgggtgagatcctgtcgcacgactttgtcgaagccgcgctgatgcgccgtgccggctggggcgtgtggatcgcctacgacctggaaggctcgtacgaagaactgccgccgaacctgctggacgaggtcaagcgcgaccgccgctggtgccagggcaacctgatgaacttcaggctgtggctcaagcagggcttccacgtggtgcaccgcgcggtgttcctgaccggcatcatggcctacctgtcggcgccgttgtggctgctgttcctgctgctgtccacggcgatgctggccaagcacgcgctggtgccgccggagtacttcacgcagcaataccagctgttcccgacctggcccgaatggcatccggaaaaagcgctggccttgttctccgccacggccacgctgctgttcctgcccaagctggccagcgtggtgctgctgctgaagcaggcgcgccgttatggcggggcggtgcagctgattgccagcatgctgatcgaggtgatgctgtccgcgctgctggcgcccacgcgcatgctgttccacaccaagttcgtgatcgccgcgtacagcggctggggcatctcgtggaagtcgcccccgcgcgaagacgccgagaccagctggggcgaagcattccgtcgccacggctggcacaccgccctgggcctggcttggggtggcctggtgtactggctgaacccgtcctacgtgctgtggctgctgccgatcgtgggctcgctggcgctgtcgatcccgttgtcggtgatgctgtcgcgggtgtcgttcggtcgcgcctcgcgcaatgcgggcctcttcatgatccccgaggagacgcaggtaccgcgcgagatcgtcgagacgcagcagcatgtcgaagccgcggccgaaacgcctgactttgtcgatgccgtggtggacccggttaccaatgcgctgatgtgcgcgaccgccacgccgcgcgtggtgcagccggaatcggcacgcaagcgccatgaggccctggtcgagcatgcgctcacgcatggcccgcgcgcgctgacgcccgcgcagaagcatgtgctgctgggcaatccgtttgcactggcacgcctgcatgaactggtgtggggctcgccgctggccgatgccggctggaaggacacgcgcatcctggtgcggcgcgcggccaacgtgctgccgctgcgcccgcgcgctgcctgagcggtactgacccaaacgagaacggcccgcatctgcgggccgtctttcttttgcgcgggcggcgtgccgtgccgcatcaattgcaatcgattcttgtttgtattggctagcgcagcgcggccgtgcagatgggcgcgttgatgtagacatcgccgatgcggcgctcgccacggtccttgcgcgtcatgtagcggaacatcaggctgatgcctagcttggtcaggatctcgacgtcgcggttggcgcagatattgcgctgcaggggcgcagcgtagttgacctcgaagctggccaggtccagcatcggcccgcggtagttggtgagctccagctggaacagcacatgcttgccggggatcgactggcagcggcgcagccgcgtttctccgtcgatttcgattggcagggcgtcgttgagctggcggcaggcgcgtgccagcacgttgtcgggccgcgtggtgttgcgcagcaattcaggcacgccggcggcgccggtgttctggccagtggcagcgcccttgagcatgcgtgacagcgggtcggcctcatcgatcgctggggccggcgccgaggcggcgacattgcgcgcctgcgccggcgcggcgttgccgggctggggcagaggcaacagcagcgcagccgcgagtgcggccgggcctagcgaagcggaaagcggcgtgtgtcgtattctcatgcaggctaacgttgccgggaccgatactgtcgtccgtctctgcgtggccgacggtgtggcttgcgccgacaggctggcattgtaccctccaccttgccacaggtgaaagccgcgccaccccgcaagggcatccgcagcgccggattcgcgctgccgtgatcgcaaatgacctgacaccactattcaccaatagcgccaacttcgccagcatcatcgaacccgaccttggcggggcagtttttctgaacgactgtttcaaaaccggctacgccagtgccgtaccgctttcgttatgctgtgcaacaattgcgtcttttcacgggttgcaggcgcgggctgcggcgcaagcaggctggccgtgcatgacaacgccgttccccccggatacttcccatgctccgttccaccagcgctgcctcggccgcgcgctttcctgcctggctgctgatctgcggttcgctgatggcgatcgcgccgttgtcgatcgacatgtacctgccgagttttccgtcgctggccggcgatctcggcgtggacatcggccaggtgcagctgaccctcggcacattcctggtggggctggcgctggggcaggcgttctatgggccgttcagcgaccgcttcgggcgcaagccaccgctctatgtcggcctgtgcctctacgtggccgccgcggtgggctgcgcgctggcacgcagcgtggagtcgctgatgctgtggcgcttcctgcaggcgctgggcggctgcgccggcatggtgatggcacgcgcggtgatccgcgaccggcttgaggcgcatgagtcggcgcgcgccttctcgtcgctgatgctggtgatgggggttgcgccgattctggcaccgatcgtcggcggcgccattctctcggtgtcgggctggcgcgcgatcttctgggtgctggcggtggcagggatgctgatcctgctgctggtacacctgcgcatggaggaatcgctggaccggcgccatgcggcgccgctgaggctcggcacggtggcgaaaagctacgccgagctgctgcgggatcgcgaattcctcggctattcgctgtctgcgggtttcggctcggcgggcatgttcgcgtatatctccggctcgccgttcgtgctgatcgagctgcacggcattgcgccgtcgcactacggttttgtgttcggtgccaatgcgctgggcctgatcacgatgtcgcagctcaacgccaggctggtgcgcggccgctcgctcgatcaggtgctcgggggcgcgctgctggctgcctgtgcggcgggcctggcgctggctgttgccgcgcttgcaggcgtggcggtgctgccggtgctgctggcgggctttttcgtctttatcggcgcgctcggctgcgtatcgccgaatgcgtcggcactggcgctcgcccatcagggccatcgcgccggcacggcttcggcgctgatgggcacgctgcagttttcactcgggacgctgggcggcgcggcagtcagcctgtggcgcgacggcaccgcgctgccgctgggcgtggtgatggcagcctgcggcgcgggcgcggtgctgatgcgatactacgggcgctcaggcccccgctgataccgtctgcgagccgtcgtcaggcagcctgttgcgcggcggcctgctgcgccaaagcctgctgcaccaccaccatctgcgccggcattggtgcggcatagccggcctggccgaagctctcgcggatgatgcggttggtatcgaaatagacttgccagtagtggtcgttgtggcagtacgggcgcaccgccagcaccgggccgaccagcgtgaactccaggatctcgacatcgaccgggggctcggccagcacgttggggatctccgcgatgcgggccttcagcagcgctgccgcatgggcggtgtcggtgctgccggcaagctgcgctttcagttccacgcgccggtacgggttggccgtgaagttctggatggtatcgctgaagatcttgttgttgccgaccacggtctgcacattgtccggtgtgtcgagcgaggtcgcgaacaggccgatctcgcgcaccgtgccggtcacgccgccgatcgtcacgaagtctcccaccttgaacgggcgcagcaccaccaggaacgcaccggcagcgaagttcgccatcaaccccgaccaggccatgccgatggccacgccagcggcggcgatcagtgcggcgaaggtcgtggtctggatgccgaagtagccaaggatgccgatcaccagcaccacgttcagcgtcacggtgacgatcgagccgacatagcgcagcagcgtgggatcgaccttctgcttgccgagcgcgttctgcaccatgcgcacgacaaagtggatcagccagcggccgatgacccagaaggcaagggctgccaggatcttgaccccgaattctgtcgcgtaggtgacgaccaaggccttgaggttatcgaaggtagtggcatccatcggcgtagtcctttcatgttggtgtccggccggccgccggcacaacatcccccgattcagccggcagcaatgtgctagccctgcgcgctgttgcggcgcaatacatgggcacggcaattattgagacgccgtaccggaagtgcaagcaaattattgttaagacaagctgccttgcgcagcttgtcaatttaaatcaggacggcccgcacgccattaccagttggtttcccgttccggcgttgccgaaatccggtgcaaggtcaggtccgctccgttgaattcgccttcggcatcgagccggatgcccaccagcttcttcagcgcgccatataccagggtgcccccggccagcgccaccacgatgccaagcacggtgccgatcgcctgcgcgcccagcgacacaccgcccaacccgcccagcgtcctggccccgaagatgcccgcggcaatgccgccccaggcgccgcacagcccgtgcagaggccacacgccgagcacgtcatcgatatgccatttgttctgcgccagcgtgaacatatagacaaagagcgcgccggccaccgcgccggtgatcagcgcgccgagcgggtgcatcaggtccgagccagcgcacaccgccaccagtccggccagcggcccgttgtaggcaaagcccgggtcgttgcgtccggccgcccaggccgccagcgtgccgccggccattgccatcagcgagttgattgccaccaggccgctgaccttgtcgaccgtctgcgcgctcatgacgttgaagccgaaccagcccaccgccagcacccaggcgcctagcgccaggaacgggatgtttgagggcggatgggcgctgatgcggccgtccttctggtagcgcccgcgccgtgcgcccagcagcagcaccgcgggcagcgcgatccagccgcccagcgcatgcaccaccaccgagccggcgaagtcatggaatggcgcgccggccacgcgcgtaatccagtcctgcacaccatagcgctggttccaggcgatgccttcgaagaacggatagacaaaacctaccagcacgaaggtggcgaccagttgcgggttgaagcgtgaacgctcggcaataccgcccgagataatcgcaggaatggccgcggcaaatgtcgccaggaaaaagaacttgaccagttcgtaaccgtttttctgcgccagcgtttcggccccggacatgaattgcacgccgtaggcaatggtgtagccgataaagaaataggcgatggtcgaaactgcaaaatccaccaggatctttaccagtgcgttgacctggttcttcttgcgcaccgtgcccagttccaggaaggcgaagccggcgtgcatggccagcaccatgatggcgcctagcagtataaacagggcgtcggtgccggtcttccagtcgtccatagtgacctcatgctcaaaatgggagcgtgagtacgcaaaaagcattccagcaacggccgcatcctggtgccatgtgcaccttgtcgggtaaaaccgcaccggaatgccgcgcgcaggcaggggcgggcgctgctggtagcgttgccgctggcatcgccgtgatagtgcagatgcgccaaaatggcgcgaaacggcggcgcgggctgaaccgttatggtgcggcgccccatttgtgggaatctatcctatgctgctggtttgccccacgcgcgggccggtctggcgttgccgcgctgcgggacggcccggcaaagccggcttctggcaagcgggaaaagcgtggaaaattgcccgctaaccggcctcaatcaaggatttgcgggtttttttgtcgcattggtgccactggggattgctctacgcgcgacgggcagattagactgcgccgatcgatggctttgccgcgaggcacgcacatcggtgacgacgaccaacaagggaaatcagccatgaataaaggtgaactggtatcggccatcgccgcggaagcagaactgagcaatgccgccgccgagcgcgcgctcaacgcagcgctggacagtatcaagaaggcagtggcaaagggcgattcggtgacgctggtgggctttggcagcttcagcgccggcaaacgcgccgcccgcaccggccgcaatccgcgcaccggtgaaaccatcaagatcccggccgccaagacggtcaagttctctgccgggcagggtttcaaggacgcggtgaacaagaagaagtaagcagtttgcgtccacagcgtgaaaagcggccttgcaggccgcttttttgttgcctggcacggccacgcctgccggtaccgggctgcagccggcaacggcgggcacgatccgggttaaactgccggcgccagcgttccggcgtgcagtcaggcaatgccgccgtcgcaggttcgccccagaaatcccgcccccgcaatccgtacccgcatcatgaacgatctgtcccaccagctttccatgaccgtgctgatgacgccggacatggccaacttctccggcaacgtccacggcggcaccatcctcaagtacctggacatggttgcctatgcgtgcgccagccgctacgccggccgctacgtggtaacgctgtcggtcgaccaggtggtgtttcgccagccgatccacgtgggcgagctggtgaccttcctggcctcggtcaacttcaccggccgcagctcgatggaaatcggcatcaaggtggtgacggaaaatatccgcagcaagctggtgcgccataccaacagctgctacttcaccatggtggccgtggacgacaacggcacgccggccgaggtgccgccgctggagccgcgcgacgaggtggagcgccagcgctttgccgccgcccagcagcgccgcgcgctgcgccaggaaatggaaaagcgccacgacgacatcaagtcgtcggtgacctgaatacccccgccatgaagcgctactgcaatcgcatccgcacggtcctggccgtcgtctgtctgacggccgcctcgggcgcccacgccgaggagatcggcagcgtcagtaccaatttccgcatgaccggctccgacaaggtcgtgatcgaagcctatgacgacccccaggtggacggcgtgacctgctatgtgtcgcgcgcccgcacgggcggcatcaagggccagctgggcatggccgaagacccgccggaggcatcgatcgcctgccggcaggtggccacgattgccttcaaggggccgatccggcaacaggacaacgtcttctccgaacgcatgtcgatcctgttcaaggccctgcatgtcgtgcgcgcggtcgaccgcaagcgcaatacgctggtgtacctgacgtactccgaccgcattgtcagcggcagcccgcagaacagcgtcaccgccgtgccggtgccggccggcacggttatcccggtgaagtaaccctgcagcagccggccccggcacctggtggatcagggcgccagcgccgcgctctccgcctggcagtcgcgcgacgggcgcgcgccgctggcgcgtgccgccgccacttcgcggcgggcgcggtccaggtcggcgcggaaggtggggtcggcatgcagccgcgccaccgttgccgcggccatcatgcggccctcgttgacatcgctttgccagtgcacgttgcagaccacgcggctctggccgaacgcgcgcccgcgcgccaggatgtcattggcgcgttccggctcgacctcagccaggatcagcgcccaggcccagccgatggcgctgtggccggacgggtacgaaccgtccttttccagcttggcggtctcggccggcgtgcacatctgggtcttgttggcaacgaaggggcgtgtgcgcttgtagtggtccttggccttgtaggtggacaggccggcatcgaccaggctgcggcgcagcaggatgttcaggtacggcgtttctttctcgctgaccggcacgcccagcgcgcaggagaatgcgctggcggcctgcgggaacgtcaacacggcatcctcgccagccacttgccagcgcggtgaaccgcgcagcgtcccggcctgccgcgcggcatcctcatccagcgccagcgctgccgagccctgcgccggcggcgcgggcagcagcttcaggctgtccgggcgcgcgtcggtagccaggtagccggcaggcacgcccgggcgcagttccggcaccgcggacaggttggtgccgccggcggcgcagccagccaccagggcggcgagtgccaccgcgatagttgcccgcaccggggcggacggggagtggtcacgctttgcttgttccgtcaatttgtcgttccttgttgttcttgtcgagtcggcgctcctgccgcagctcaggtggcagcgtcgaacagcttgcgcaggttcgacttcaggatcttgccattggcattgcgcggcagcatctcctggtaaatcaggatacgcaccggcaccttgaatgccgccagccgggtgcgcacgaaatcctgcagctcggcctcgcttgcctgcatgccgggcttcaggctgatcaccgcggccggttcttcgcccagcgtcttgtgcgcgagtccgaccaccgcggcatccatcaccgcgggatgctcgtacagggtgctttccacctcgatgcagtagatgttctcgccgccgcggatcagcatgtccttcatccggtcgacgatatagacgtagccttcctcatccagccgcgcaatgtcgccggtgcgcagccagccgtcggcaaaggtctgcgccgtggcctcgggcttgttccagtagccgcgcacgacattggcaccgcgcgccatcagctcgccggttgcgccgggtggcaaggcgcggccgtgcccgtccaccaccttcatctcgccgatcggcagcgccgggccgctgctgtccgggcgcatcacgtattcctcggcgctgtggctggtgaaggtggacgacgtttccgtcatgccccagccgatgccgggagcggccagcgggaatacctcaccgatgcgccgcaccagttcgggagatgccggcgcgccgccgtagttgacgttctccagcgaggacaggtcgaagcggccgcgctccggatgctccaggatctgccacgcgatggtgggcacgccgccggccgcggtgcagcgctcgcgctcgatcagctccatgccgcgcagcgcgtcccagcggtgcatcagcacgatctttccgccggtggcgatggcgccgttgagcaccgccatgcagccggtgacatggaagaacggcaccgccagcaacatggccttttgcggcgcggcggggtccggcgcgggaatcggctcgccccggcgcaacaggttgcgcatcgggctgaagctgcctgcaacggccacgttggtggagttgcggtgcgtgccgagcgcgcccttgggtttgccggtggtgcccgaggtgtagaagatggtggcgtcgtcgtccggatcgatatcgacctgcggcggcgcctggtctggcagcgcggcccagtcagccgggcagccgatcacgctttccagcggggccacgcgcggctcggccgcggtgccgccggcacgtgaggcatagatgcgttccagcgccgggcagcccggcaggtgttccaggatgcggtcgagccgttcggcatcgacgatcgccacgcggctgccggaatcggccaggccgtactccagctcggccccggtccaccaggcattgagcggcgtcacgatggcacccgccagcagcgcgccgtagaacgccaccggccattcaggcaggttgcgcatggctacggccacgcggtcgcccttgcgcacgccatcgcgcaccagtgcatgggcgagggcgatggcggcgcgacggaaggcatcgtaggagacgcgctcgtcctcatagaccacgaaggtgcggtcggcaaacgcgcgcgtgttcagcaacagctcgcgcagcgtgggcggtgcgttcttccagacggtggtggggatgccgcggatcacgcgcgtttcggtttcgaacggcgcgccgggcgcggtaagccgggcgtgggcctcggccagcgacatgaccggccaggtgccggccaactgcggattgctcgacatgactgcctcccggaactgcattgcaggttgagggaaatgcaggaaagcggcgggcgccggcctcaaggccggcgcccgcaacgctggggtcagacgctcagatggtcacgccgccgtccacgaccagcgcctggccggtcatgaaggtgctggccgccgacgccaggtagaccgccgccccggcaatctcgacgggttcgccgatgcggcgcagcggcgcgccctgggtggactgcttgtagcgctcgggatcttcccacagcgcgcgcgcaaagtcggtcttgatcagccccggcgcgatgcagttcacgcgcacgttgtgcggcccgaactctacggcgaggttgcgcgccagctggaagtcggcggccttggagatgttgtacacgccgatggtgggcgagccgcgcaggccgccgatcgacgacacgatgatgatcgagccgtccttgcggtcgatcatctgcggggccaccatctggatcagccagtggttggagatgacgttgttgtccagcaccttgcggaactggtcgtccgacacgccgctcatgggcccgtagtacgggttggacgcggcattgcagaccagcacgtcgatcttgccgaaggcgcggttggtctcgtcgaccaggcgctgcaggtcgtcctttgaagaaatattggcagggaccgcgatcgcggtgccggcgccgtggcgggcgttgatggcatccaccacttcctggcaggcctcgatcttgcgcgaagaaatgaccaccttggcgccctggacggccatctgctcggcgatggcgcggccaatcccgcgcgaggagccggtgacgatggcaaccttgcccgtcagatcaaacaatgacatggagtctcctgtatggctgcgccggcgtcaggggccggctttgtcctggcgacgcgcccgcaggcagcatcgccgggacattatggtggcgccgctggccccagtccacaggcccgggtgccgtgcgccggccatatcaggattctttctgcgggcaatgcgcgccgtgcatggcaggcatgctgcatagcagaataatggcgcctcaggtgccagaggatgccgttgcgggcgccagcagcgctggcagggcgtcggccaggccacgccgcagctcatcgtccagcagcacgccaaagcgatccgacaaggcctgcaccacggcctcgggcgaggccagccgggttcggcgcacggtgccgtcagctgcgcgctcggccagctcgccgtcggccagcgtcacgcgggtgccgccgtcggtgcgcgcggccatcagccgctgcaggaatacgctgtcagggtgcgtcgatacataccagttgcgcggcacgaaatcgatccacggctgcggtgtcaggtcgaagcggtagaccttgatccagccggcatcgccgcgcgcctccaggtcgtagctgtggaacgcggtggcggaggtctgcggcggcgaaggcgccagacggtaggggaagctgtcatcggccggctcggacagcggcatcgccctgtatggcgtggggccgccgaagccgacatcggcgaggtagctgcgatgcgccacctccacccgcagcagcatgtgcgaggtcgcggtcggcacgtcgtcgggaacgccccagcgcacgcgcgcggccagcggcgtcacaacgtagccgagcgcgctcagcccggccgcaagcagggtattgagttcaaagcagtagccgccacgacggcgcgcgacgagcttgtcgaagaccgcatccagctcgatccgtactggccgtcgcagcagcggatcgacgttttcgaacggaatgctggccaggtgcgcggccagtacgatatccagcgcttccagcgtgggcgagggcggggcggcgatgccgaggcgcgcgagccaggcatcctgttggggtgcgtccagggtcatcatggtgtgcggggctccggtgcgatgcgttcagttgagcgcttccagcgccggcaggtcaagcagttcgatgccgccatactccagccgcagcagcccgcgcgcttccagttcgcgcagcgcgtggttcacggtctggcgtgacaggcccagcatctgcgccagctgctcctgcgggatgcgcacgcgctgcgtggcctggatctgcggcaggttgccgtagccatgtgcgatcgcggccaggcgccgggcaatgcgggccgccggcggcagcaactgcgcttcctcgacatagttgaaggcctggcgcgtcttggctgccagcaattgcccgaaggcctgccaccatgccggctgctgcgccaggcgctgctccaggctggagcgcgtcacatgccacagtgtcgtggcgctgaccgcgcgcgcgtcgtgggtgcgcggcaggccgtcgaacaggcagatctcgccgaaccaggtgccgggttccagcagcccgagcaacgccgccttgcccgattcgccgctggcgtggatctgcatggtgccgctggcgacacaatacaggccgtcgaaacggtcgccgcgggcaaagagcgtctcgccggccaccagccggcgcaggctgccgtcatcgagcagtgcctggcgcagtgcgggcggcaactggctgaaccaggcgccggcacgtacggcagcaagcgcatcgtcgcgcggcggcaccgtgccgggcagtttgccggcgagttgcggttgagggcgttgcggcgggctcgccagtcccatgccggtctcctttcatatggggttgtgccgggtgtcagcagggacacacaagggcacgctgcgacggtccggactgtcaaaaacctgacagaccagactgtgcgcgcccactactataaatccacatcccgcccgccgcgcagcagcaggcggcagcgtccggccgcccttgcggcgcggcacgcgcacgcctgcgcatacaaggagatacccccgtgaaaaccctgatcgaacacctggccaactacgccgcctaccatcgcgacccgcgcaacgtctttacgcacttcattggcattccgatgatcgtgctggcagtgacgacgctgctggcgcgcccggcgctgccgctgggcgacggctctgcctacctgacgccggcgatgctgctgtacatcctgtcgtgcctgttctacctgcgcctgtcgctggtgttcggggtggcgatggcggtcatcctggcgttcttcctctatgccggcgcccacatcgcggcgatgcccaccgcctggtggcttgccatcggccttggcctgttcgtggtgggatgggtgatccagttcatcggccactattacgaggggcgcaagccggccttcgtcgacgacctggtcggcctgctgatcggtccgctgttcctggtggcggaaaccgcctttgcgctggggctggcacgcggcacgcgcgaggccatggccgcccgcgcgcactgatcagggcagccccgccggcagccgcagccgcgccgccagcccgcccagcgggctcgatgccagcgccaggctgccgtcgtacatcgcggcgatttccgtcacgatcgccaggcccagcccgctgccggcagcggcctcgtcgagccggccaaagcgggcggtggcgagtgcctgcgcctccggcggcatgcccgggccgtcgtcctcgaccagtatttcgagctcgccatccgcttcctgcagcgtgacgcgcacgcgcgtgcgcgcccactggcaggcattgtcgagcaggttgccgagtatttcgaccaggtcttgccggtcgccggcaaagtgcccggcgccttcaaccgtcagcgccagcgcgcgctcagcgtgcagccgcgccagtgctcgggtcagctcccgcaccggcgcgccggcatcgatacgctggccgcgcgccgccgcggcgcccgcggcgcgggcgcgtgccagatggcggtcgacctgccggcgcatcgcttcgacctgcgccgccacggcatgcgccggcgcccccggcagcgccgcggcctcgttggcgagcactgccagtggcgtcttgaccgcgtgcgccaggtccgccgcctgccggcgcgagcgttccagcgcctgagtgttgcgtgccagcagggcattgatctcggccaccaggggttcgacttcggtgggccagttgccgcccaggcgtgcctcgcgccgcgcctgcatcgtgcccagcgcgcgccgcagccgcgccagcggcgccagcccaaacttcacctgcgccgcaaccgccagcatcagccccagtcccagcgccgtcagcgaccacgccagcgtccggttgaagctgcggcgcgcggcacgcagctcggtccggtccagtgccaccgagatctctaccggggtatccgcggacggcagcaccagttgccgcgacaccaccagcaacgactggttgccggggcccgggcgcacgtcggcctgggcgccggcaaggcggcgctccaccgtcaccggcatttccgtatcccacagcgagcgcgagcgcagcagcgcgcccggcgcgcgcgcctgccagtaggtgccggagtagggcagctcgtagcggggatcggcgggggtacgggtgaggaccagcttgccgtcggcgctccagtccagcgccgcggccaggcccgccaactggtggtcgagctggcgcacataggtgttgttgacgtggcgctcgaacagcgtcgacagcagccagccgctggcgcccagcgccgctgccagccagaccgccgccactgccagcaggcgcagcgcaagggatcggcgcaggcgggccggcatctagggctgcggtggcgacggcggccgcatgcggtagccctggccgcgcacggtctcgatgacatccacgccaagcttgcggcgcagccgcccgacgaagacctcgatggtgttgctgtcgcggtcgaagtcctgggcatagatatgctcggtcagcgcggtcttgctgacgatggcgccgggatggtgcatcaggtagtccagcacgcggaattcatgcgaggtcagtgccaccggcgtgccgtcgacggtgaccttgcctgcgcgcggattcatccgcaccgggccgcattgcagctccggcgccggcatgccgtgcgcgcgccggatcagcgcgcggatgcgcgcgagcagctcttccatgcggaatggcttggccaggtagtcgtcggcgccggcatcgatgccttcgaccttctcggtccagctgtcgcgcgcggtcaggatcagcaccggcacgccgacctgcgcggcgcgccagcggcgcagcaccgaaaggccgtccagccgcggcaggcccaggtccaggatgacggcgtcgtagggctcctgctcgcccaggtggcaggcatccaggccgtccgcggccacgtcgacggcatagccggcctcggccaggctggcgcggacctgggcggcgagggcggcttcgtcttcgaccagcaagatgcgcatcggggtttcctgtcggtcagggtttgcggcgggcgttttccagcccacgccccttcgccttgagcagggcggccgtgcgtgcatcgtactcgagcttggccaccgaaccgcccggcaacagcagcttgacctcgtattgccagatgccgtcgtcgcggtccagctcaacgccgatgacgtcgccctcgtactggcgcgataccgtttccaggatgcgcgacagcggcaggatttcgccggactgcacggccgcgcgggcgcggtcggcgtccttgtcggcgtgcgcggccggcatcgccgccagcgccagcagcgccgcagcgaccagcacgccggggcgcaggagggccgggaagttgaacttcatggcccggagtttgcctcagattgcctgaatgcgggctgaacgaaaccctcgtgaccaggcagcaaacggtagcgccgcagcacgcgcatcgctgcgcgcacaggcaccgaagagcctgccgcgaacgccaaaacgggggtacgtaggccgtattcgcgtttccactgaggcaaagccgcgacaaaacccggggttttcacggggttttacgtttcgaatgcacgaaaaccccttgacttacggtactttccgctatgattcagtgggcgtcgagcagacgattgcgcaacgctgagaagcaatgcgaaacacctgccgacacccatctgttcaacttacgaatatcgatatggcgaccaaagcgaaaccgaccgcgaagactgcaaccaagcccgctgccaagaaggccgcggcaaccaaggcacccgtgaaggctgccgccaagaaggccacgccggccaagaaggctgctcccgccgctgcgcccgttgcgcgcccgctgaaggacaccttcaacaagtcgagcctggtcgctcacctggtagcccagacccaactggaagccaaggccgtgaagacggtgctggcccacctggaaaccaccatcatcggcgcgctgaacaagaagggcgctggcgagttcacgctgcccggcctgctgaaggtcacggcgcagcaagtgccggccaagaagaagcgtttcggcaaggacccgttcaccggtgaagagcgttggttcccggccaagccggccagcgtcaaggtcaaggtccgtccgctgaagaagctgaaggacgccgcagcctgatctgcgccacgttgttctgacaaaaaaggagccgcttgccggctcctttttttatgcgcgagcgcaatacgtgccgcgcgttcctgcattttcagccgccggcgacagaccggcgcgggaggagacacgatgccaagtctgcaaagccagctgtggcggcttgccttgcgcctggtccgccgcaagcggcggtttgccagcgcccaggcgctccatgatgaaatccggcggcgccgtatcgtcggacgcgcctatccgtcccggcgcctgcgtgcgcggcatgcggtcagcgaggagcggatcgccggaatggaggtctacaccgtgcggcccaggggcgggcctgcgcacggtaaatcccgccatatcctttacctgcacggcggcggctatgtcttcgacatcgtcagccagcactgggatttcatcggcaagctggtggacgcgcttggctgcgcggtgacggtgccggtctatccgctggcgcctgaacatacccaccgcgacgtgttcgcggccatggtgccgctgtggcaggtgctgcagcagcgccatccgggcgcagacctgaccgtcatgggcgattccgctggcggcggcatggcactggcgctggcacaggtgctgcgcgacagcggccagccgctgccgcggcggctggtgttgctgtcgccgttcctggatgccaccggcgacaatcccggcatcgatgccctggagccgttcgacccgatgctgtcacgccccgggggcattgaatgcgggcgcgtctatgccggcgcggatccggtcaccctgccgcaggtcagtcccatgcacggcgtgttgcgcgggttgccgcccaccacgttgtttatcggcacccatgacatcctgctgcccgactgcaggaagttccgccagatggccgacgagcagggcctgccgcttcggtatcacgagggcgagggaatgttccatgtctggatgctgctgccgatgccggaagcggacgcggcgtttgccgagattgtgcggtcagtgcttgccgacgacgcgcacggcacggagggtagggacgggctggcgcctgtgcgcactgccgttgccccgcaggaggtgaccgacccgggttgatgccggccgcccggtgattcatgccaggctggccgcaaccggatccgactggagcaagtttaacctgcgtcaaatggacaggacgggcgcccccctagaatcggtcaggtcatgggtgcgggggcgctccccatgacagagcttccggagtcttcctgaagcttccgcccgcggccgcaatggctgcgggttttttatttggcggccaccatccggtccgcaaactcaggccaccacctgcttggcataggttgcccgcgccatctcgcagacctctaccgacacctgcacgtcctggccggtgccggagccggcgcgcacggcttcggcgatcacgtcgcagacggcctgcgccagcgcctggcgcacggcggtgtcgcggccgtccaggatcgacaggcgcgcgtggacaaaggcccgctcgaccgcgtccacgccctggcggtaagtcgacagcgtgacgcagcgcgacttgatgtccgcctcctggaactgtccggaggccagcagggcggcattggcttcatccagcaactcttcctgcgagcagttcaggcgggtgttttcggtgagttcgatgacgaggtgaggcatggcggcgtcctgactgtgttccggtgaaaccgagcatgatacgggatcgggggcgcgtggcgggcgcaccaatgcaaacggggcgctttatggcgccccgtcgggatgtgctgctggtgcggatcaggcggggacgggcgtgcgctcgcgtgccggtgccagtgcgccgccaaagcgggccggattttcccgggcgagctgctgcagctgggccagcttggccttcaggccggcatccattttcggtgcaggcatcaccgtggacgggcaggccacgcccaggatgccgagcgcctgctggaagttctccagggtcagcccggcagccgggtcaacggtgacgagatgctcgcgcaaggcctcgggcatcgactccggggcggcgcaggaaatgatcacgtagtgaaccggcttggcgccctgggcgaaataagcttcgatctccgcaccatggccgcctgcggccggcggggtcatggcttcgacctgcaggtccagctgctgcaggattgccgcgggcgtgccgcggcgccaggcgtcggacaccaccacgcgggcgccggccacgccgaacaacctgcgtacgaaccccagcgcgacaggatcaaagaaccggacgtcgcgcagcgtgcccgaatccggaatgccgccgaggcgggtgcgggagcggtcggaatacaggacgccgggtacgtccagcatgatgagtcgttcagccatggtttcctgtgcgggtgacagttcagttggtgtgaaccaagattactcgccacgggcaggctgacacgtaaccggcacgggttcagttgaaacagatctgtaactttatcggggtagacgtaaatgccggttacgtcgccatgacaaatgtttcgcccagacacatctgcccgttacaaagatgacacgcactagaagcggaagcgggccacatcgtcggccagtgccgctgcgtgctggtccagccgggctgcctggctggccagctcatcgaccagcgccgcgttctgctgggcggtctggcgcagctgcgatacggattgcccggcggcctgcacgctgccggcctgctcgtcggcaagcgtgcgcaaggcctcggccagcgcatggctgtgcccgacggtagccgcgatgcggtccatcgccgccaccacgctggcgctcaggcgcgcgccttgctcgatctcgtgtgtagcggtgctgacgatgccgtcgatctcgcgcgccgcatcggcgctgcgctgggccagcgcgcgcacttcttgcgcgaccaccgcgaagccgcggccggcggggccggcgcgggccgcttccaccgcggcattcagcgccagtatattggtctggaaggcgatcccctggatcacgccgacgatctcggcgatatggcgcgagtggccgtgcagcgtatccatcgcgccgcgcatctgctgcaccacggcagcgccggcatcggtggcggcgcgtgcctggctggccatctggctcgattcggtggcctgggcgtgcgcgtcggccacgcgtgctgccagtgcctgcatgctgccggtggtggcatcgagcgcgctggcctgccgctgggtgcgcgccgacaaggcgtggttgtcttcggcgatctgctggctggccgcggtgatctcctgggcgctggcctggatacgggccagtacgccggcaagctggtcgcgcatgcgggccacgtggtgcagcatgctgctgtggtccgacgggcgcagggcaatggtggcggtcaggtcgccggcggctatgcggcgagcgatctcggcggcgtcgcgcggctcgccgccaagttcggcacgcaggctgcgcgcagcgatccacgccagcgcggcggccgccagcaggctggcgccgagcagggcggccatccatgcctgcgcgcgcagctggctggccgccacgctggccacagtggcggcggccttttgttcctgctgctggcgcacggcttccacctgccggctgagggattgcagctgttcagtaacgaagtggccgtcgaccgagaccgcgctgtcgaattgcagcgagtccagcggctgcttgcgcagcagcgccacgtaggcctgcaccagctcgccggtgcgctggcgttcgcgcagcagcggcgcggcctgtgctgcggcggcctggcgtacgccggccagcgcagcatcgagctgcgacaggccgagcgcgacgtcggcggcggcatcgtcgcgctcggtgctgctggtggccatggtcaacgccagctgggcacggccgagggtggccagtgccgactgcgcgcgctcggccgagatggcaccgtgcatgtcgtgctggtacagggtgtcggtgcgcgccttgatcgagaccaggttggcgatcccggtcaacccgaccgcggcaccgaacaggtacaccagggcaaaggcagcgcacaggcgtgccaccagcggcaggcggcccagtcgtgcggaaagccgcgcgaacagccgcgcgggggcagctgcccggctgcggccgggcaggtgtgtcttgatgacttgcaccacggagaagactccaaacgggcgtgctggctcctgaaggatgcacggcccgggcttgacccgaattgccgcgcgcgctgtcctctgtccgggacggtcgcaggcggcgcacggatggtcgatcatcaacgtgacgccggcgtgacatggaatgaggatttttgtcatcacgctgtcatatccatgtcatgcaatgtcgctcgccctcttgccccatccccggatttcccgccatgacaggcctgcctgccgccacgcctttgctcgaccgcgcacctgtcgcatctggtacccccatcgccgcagcacttgcgcatgcgcggctgccgccgctgcatgcggtattccagccgatcgtgcaggcggacaatgccgagatcctcggctacgaggcgctgatccgggggccggcgggctcgccctgggcgagcccggacgcgttgttccggctggcgcagggcgttgccgcgaccatggcgctggagatccacgcggcgcgcactgcgctggccgcctggcgcagcctggacctgcccggcaagctgttcctcaatttcagccccatgacgttgcggcacctgctggccgagcgcgggcggctgatggcggcgctgctggaggccggtattgcgccgtcgcgcctggtgatcgaaatcaccgaacagaccccgatcggcgatgctgccagctttgcccaggcgatggcggtgctgcgcgagcttggcatgcagtacgcgctggatgatttcggcaccgggcatgccaacctcgacctgctcgcgcacctgtcgccgcagttcgtcaagatcgacaaatcgctggtgcggggcattgcgtcctgttcgcggcggctggagatcctgcgcgcgctgctgcgcgtgatgagcgcctttggcgggcgcgtgatcgccgaaggcgtcgaggacgaagacgagctcgccgtgatccgcgacctgggcgtggccggcgcccagggctactacgtgggccggcccttgttgcggccggccgcgcaggcgccgcagcacgtgcaccaggcgttggcttcgcggcatatcgccgtgtttccgcaaatggtgcgctcaggctggtcgggcatcaccgccgggcgcctgctgcggcctgcgccgacggtgtcgcctgccaccagcaacgatgcggtgctgcgcgtcttccaggaccagcccgacctgcaggccgtggccgtcgtcaatgacgaaggccggccgctggcgatcatcagccgccaggctttcatcgaccgctacgcggcgccattccatcgcgagctgtatggcaagaaggcctgcatcgccatggccaaccgcgagccggcctgctttgaccatcgcgccagcctggaggagatggcgcagatcctgtccggcgagaacacgcgctcgcttgccgatggtttcgtgattaccgaacagggccgctatatcggcctgggcaccggcgctgatctgatccgggccatcaccgaagtgcgcatggaggcggcgcgctacgccaatccgctgaccttcctgcccggcaatatcccgctgaaccagcatatcgagcgcctgatcgaagccgccagcgagttccgcgcctgctatgtcgacctgaaccacttcaagcccttcaacgacaaatatggctactggaagggcgatgaaatgctcaagggcgcggccgccatcctggccgaggcctgtgatcccgcacgcgattttctcggccatgtgggcggcgacgacttcctggtgctgtaccagagcagcgactgggccgcgcgcctgcaagctgcgatccggcgcttcaatgacgcggcgcgcgccatgtattcgcccgccgatcgcaacgccggcggcatgcatggcgaagaccgccacgggcggccggtcttttttgcgccagtgtcgatggcggttggcgtggtgtgcgtgagcggcgagggcgtggcgggcctgcagcggctgggcagccagcatatcggcgccgccgcggcggcggccaagcgcgaggccaagcgctcggcaaccggcatggccgtgctggatttcctgtcgctggccgcgacgctgtcggtctagcggtccggctgcctgcgtctggtgagccggcggtccgacgcgggcagcctgggcgttgcgcccccttccagtacgtcgagccggtagccgtgagcgtagacgacagtgatgacgatgccgttggcgatgccgatgcgcagggtcttgcgcaggcgcgacatcagtcccgccagtgcccgcgacagcggcgccagttcatgccgccacaccgcctgctggatgcggtcgctggacaggaccctgccgacattggaaaacaacagcatggccaggtcgaattccttcggcgtcatttcgatgcgctcgtcgtgcagcgtggcaaagcggcccacgctgttgagctggtaggggccgacgcgcactaccaggccctggcgcaggcgctcgccggtcacccggcggcgcagcgccgtgatgcgtgccatgagcacgcgcacattgagcgggcggcacacgtagtcatcagcgccggcgtcgagtgcatcgatgaggccgtcttcactgctgtcggccgcaagcatgatgatgggcacatcgcgtgagcgcgcacagcgcacggcacggataacgtcgatggccggcaggtctggcagttcatcatcgatcagcagcatgtcgaacggtacctggctaacaccgtggatcaggtcgcggcccgtttcaaacacgttgcaacgataaccggaacgtgccagcagttccggcaccggccggagttggggcgacttgcccatgagcagcgcaatattcatcgatggcgaaatacgagagccgtggcagggacggccggaccgcggcagggctggagccggacagcgatggaacgaaggcaggcaccaggcgcgcacgcacgcagcactaccgttcgcaagcagcaagcgtacaaaaagtgtggtccacaggacaatcggacatttctgaaatttctgctgtttttttgatggcgctcgcgttgttggcgtgagggggcgtatgtcggcggcgccgatggcgatatggaaagttgtccacagctcctgtggacaagccagggcgcagtggccggactgcggcctggcaccgtgatgctgtcggcgtgccaaaaaagaaggcagcgcgcgggcactatgggcgccgtgctgtcaacattcgggcagggtgtgccaaaatagcgcgcatcgcgttccggtccggggactcaagcccaccgatgctgcagagcccgagtgtcatcgccatcatcgtcctgtgctttcacgtcgtcggcgtggtggctgccctgcatgccgtcatgacggtgcgcaccgcgcccggcgcgatcgcgtgggcggggtcgctgctgatgatgccgtacttcacgctggtgccctacctgatcttcgggcgcagcaccttcgccggctacgtcgacgcccggcgcttcaatgacgaccacctgcgcgagctgcgccacggcatgaccccgcgcgagcgcgaggcgcgcagcgcctgcgtggtccatgcgccggcgcaggcctgcatgcgtgcgctaccccggctgaccggcatgccgtgcctggccaacaatgacgtgcgcttgctggtcaacggcgagcagaccttcgaggcgatctttgccgcgatcgcgcgggccagccaggtgctgatcgtgcagttcttcatcgtgcatgacgatgcgctgggccagcgcctgcaggcgctgctgtgcgagcgcgcgcgggccggcgtcaaggtgtacttcctgttcgatcgcatcggctgccacgcgctgccgcgccgctacgtgcgcacgctggccgaggccggcgtcgatgcgcgggcgttctccacgcaccgcggctttgtcaaccggtttcagctcaattttcgcaaccatcgcaagctggtgatcgtcgatggcagcgaggcctttgtcggtggccacaacgtcggcgtcgaatacctgggcgaacgcccgccactggcgccgtggcgcgacacccatattgcactgcgcggcagcgccgtgctggacctgcagatggcctttgccgaagactggttctgggccgcgcgcgaggtgccgcacctgctgatgccgccgccagaagcgggcgggcgcatgacctgccaggtggtgccgtcaggccctgccgacgcgcaggagacctgttcgctgttctttgtcgaggccatccaggcggcgcgccaccggctgtggatcacgtcgccgtatttcgtgcccgacgaggcggtgtttgcggtgctgcggctggccgtgctgcgcggcgtggatgtgcgcatcctgattccagcgcggcccgatcacctggtggtctatgccgcctccactatctatgcgtaccaggccgtgtccgcgggcatcaagctgtatcgctaccagcccggcttcctgcaccagaaggtcatcctgatcgacgacgaagccgcggcggtcggcaccgccaacctggacaaccgctcgttccggctcaacttcgagctgatggtgatgactgccgacaagggctttgccgcgagcgtggccaccatgctcgaagccgacttcgcccaagcccggcgcgtcgggctgaacgagttcctcgatgcgccggcgccgctgcgcgtggcgatgcacgtcgccaagctgtttgcgcccatcctctgaagcccgcattccggtccgctggttcctgcaattctcaatgcaaaagacttgttgcggcctgattgtgtacactgttcactatacgcgtatgcacatcatgaaccgttatccatattcaaggggagccgcatgacccgggctgtccccgcgcctccggcgcgcgccacctaccgccacggcgacctgcgccgcgcgctgctggacgcaggcatcgacctggcacgcgagggtggccccgacgccatcgtgctgcgcgaggccacacgccgtgccggcgtggtgcccaatgccgcgtaccggcacttcgccagccggcaggacctgctgcaggcagtgcgggcctcggccttgtcgtcgcttgccattgctatggagggggaaatcggcgggctgcgcccgggccgtggagccgccgcgcatgcgcgtgcctgcctgcgtgcggtcggcaccggctacctgcgctttgcgctggccgagaccggactgttccgcaccgcgttttcggtgccggatgaagtggaagatgatgccgatccggccaaggcaggcaacagcggtctcaatccgttccagctgctgggcgcggcgctggacaagctggtggaagccggcgtgctgccgcccgagcgccggccgggtgcggagtacctggcgtggtcggccgtgcatggcctggccgtcctgctgatcgacggcccgctgcgcagccgcgccaaggagcaggcagagatcctcgggcagcgcctgctcgacatggtcgagaagggcctctagcgcctgcagcaggatcacggcgaaaaaaatgccacgatggccagaaaccatcgtggcagtgtaaggaaccaggaaggggggcaacctggctctgtcggggcacccgcgggccgggtgcaagaggactgtattccgttgcttctcagctgaatatcggacatttcttaaatatcgccctgaattgtctcgatctacgcaggtcgattgccgcgcgctatcagggcgcgtccgcatttcgaggaattgcgcggcctgcagaacagtctaacttgctgtcaggcagccgaacgccggcgccacggtgaggagcggatcatgcgatatggattgggagcggccctctgcgtggcagtgctggctggctgcgtcgcctatccctatgctggcgactcttactaccctgcttatccggcttatccggtttcctctgcctactatgacggttacccggcgccggcgtactacccgtactaccgtccttggccgggctacggtggtttctacggcagctttacctatatccacggcggcagctacggcaggcatggcgggcatcactggcatggcggtggtggccgtgggcacggtggctggcatgggggcgggcgcggcggcagggggcgatgagcctgcgtcgccgtgatggcaatgcggcctgcacgggattaccatcggctcatggatgccaacggagccccatcgccatgaccaagcccgcaacgcagaagcaccagacgccagcctcccgtgaacaacagcgcaaggatgaactgatcgagcgcgaactggacgaggggctgaaagagacattcccggcgagcgacccggtggcagtcgatacccatgcgccgcgcaaacccacgccggaaccgaaaccggcgaagtaggcggacaggctatgccgcggcgcgcgcaacgcgccccgcgcgatccggcgtgctatggcaactggcgcagctgcccgatcaccgacatcagccgtccgtgcgccacgatgacgccggactcgtcctgcagggcttcctggtaacgcttgcgaaaggccgggtcagaaccgtcgctgaacagtctttccgctgcgcgtccgactgcacggcaggtttcgtcgtggtgttccttggcctccagctcttcgtcgatctcgatgatcaggcgcgacagcgggtcaagccagcggaagtagttgtcttcagtcaccagttgcacaaacaggcctgcaggaatcgggccgttcaggcgctcatactgggttctgtcatagccgatgacttccttgtgaacctgcagcaaggcagcccgcagggctttcagccccgagcgccgggtttcctgggtggcgaggaattgttcgttgggcatccccatctccgcgtttctacttgttccggtccaggcaggcggtgcgcaattgcatcccatgggtcgccgctgcacttcgtgccagtggcgattgcctgctggattctccgggcgcggccggccatgcctggcactgtgcggcgcgctgccagtataggcacgccccgcagcccgagccagcgctgccagctagcgaaatacccgtatttgcgccggctgcgcggcatgattggcgccagttgcaagccgccctcagtcgccttcggcggattgcgacgcttgcgccagcaggtcggcagcacgcgagcgccgcgcgtccgcggcgcggaagtaacgtacaaccgtcgacacgcttgcgtggccggtcatggccatggtctcggccagcggcacctgttgcgcagcagcctcggtaacgaagcccgagcgcagtgaatgcgctgagtagtcgccctccagtcccgccaatgcgcagcgcgtcttgacgatgcggctgaccgccgcatcggacaaaccttctcccacatgcccgccgcggcggatgcggcgaaacagcggcccgctgttgatgccggcggcagcaagccatgcctccagcgcctggccggcggcaccggtgacgggcttggcggtatcggcgcgctcgttgcctgactggttggtcttggaccagcccagtgcatagacgaaatcaccggggccaagccgggtgaggtggccgagggtcgcgcgcgcgacttcagagcggcggcgcccgccactggcccatgcaaacagcagcagcgcgcggtcgcgcaggccgcgcagcgagtcatcacaggtatcgagcaggcgcagcagcggatcgcgggtcagcgccgccttgcgcgcctggcgctgtccgcggcgcgcataggcgcgccggatgccggccatcagttcgcgcaccgcagcttcggcgcaagggttgggcaaggcctgcaggcgatgggccttggccagtaccgccagccggtgcgtcagcgtggacagcgcgggcgggccgggtcgtgccttgtatccgtcagcgaccagcgcctggtcgatggccgcgggcatctcgcagacaggaccttgcggcgtctgtcgcgtggcgtggtcgacgatgaactggatgacgacggcaggcgcgagcgggagctgcacaggttgccggtagcgcagggcataccaggcagaccagtagcgcagtgcggaccggtagcttgccaccgtgttttgggattcgccttcgcggcgcaaggcattggccgcttgctcggcaaggggatccagttcggacgggcgaagcggcgccggtagttcgacatcggatgcaatcggtggaaagtaggcttcgtgggcttctcggatttttatcatattaaatatgatgtatgctgtaatgtatcatatgaataggacagataacagccgataagtctccattatcgaaccttatttgtcctctcacagactttttgccggatcccatcatggaaacctttcgcagccgtggcattacccgggacgacgtctggcaggccgccgacagcctgctcaaggccggccagcggcccaccatcgaacgcatccgcctgcacctggggcggggctctcccaatacggtcagcccgcacctggatgcctggttcgcggcactgggtggacgtatccaggatccacaggcctttgcgcccgcacccggatgcccggagccagtcacggaggcagcgcgctatttgtgggatgctgcgctgcaggtagccaaggcttcggccgaggccgcgctggtgcagcgtgaggcggcactggccgaggcccgggcggcactggagcaggagcgccaagcgctggcgcaggaacgccaggtcatgcaggctcgcctggaaggggccgagacggccatggcggaactgacacgggcccgcgacgacgctacggagcgtgccgtgcgcgctgaagctgcagccaccgccctgcagcaacaggcggagacaatgcgcgcagagtcggccgcggcgctgttggcacacaacgccatgcagcaggatttcgccgcgcagcgggcggcgtgggaccaggagcgggaaaccgtgacccagcgcgccgccgccaatgagcgccgcatggcgctggagctggacgccgcgcgcgtggcggccagggagggccagaagctgctggaagccgagcgcaaggcggccgttgagcggctgacgcgtgctgccgaggccgcgtcgcgccagggcagcgagatgacccgccttggccaggcgctcgccgtgctggaagaacgtgtgcggcagcgggaaagcctgctggccgagtatcgcaaccaggcggatgccgcaaccacggccaccgccggccccggtagcccggcagtccgccgcacacggccggcccgcgctgcgctggccgccggcaagggcagtcggcggcgtacgcgaggcgtatagtgcacctgccgcggcggcaactcagggatacatggcgggtgcccaggtggattttgtcaaatgagctatactgaatgctcatttgatgaggtctgccatgccgctcatgctcactcccaaaggccgctatccgctggctcatgaacgcccggctccgcccgagctgggcgtcaacaactacgtcgccgtctatgaggccagcctgtcgacgcaaggcgccatgtcgatcatccgcgcgattcgtgaaggtgtgccggcttcagacctgaaccgcctggccgaatccatgggcaccaccaaggagcagctgatcaagacactggacttgccccgcgccaccgtggaccgcaaggcacgggcgcaccagaacctgtcgagcgagcagagcgagcgtgtgctgggcatggcgcggctggtcgggcaggtccaggcgctggtggaaagctcgggcgatccgcgcggtttcagcgcggcgcagtgggtggcgcagtggctggagcagccttcgccggcgctgggcgggcgccgccccgctgagctgatggatacgctcgccggccagcgtatcgtttccgacctggtggccaggatgcagagcggggcgtacgcgtgaggccagcctggcggatcgcgaccgacaccccagactacaccgccgacgacgccagcggcgccggcgccaaggccaccggcgggcgctggaaccggcagggcacgcccttgatttatgcggcgtccagcatcgcgctggcttgcctggaaacgctggtccacctgggttcaggcgggctgccgctgaaccgctacctggtccggatcgacatccccgacgagctatgggcggctgcgcagaaactgagcgtcgacaccgcccccgtaggctgggatgccattcccgccggaaagaccagcctcgacaccggcgaagcctggaccgccgggggcaccagcgccttgctgctggtgccttccatcgtcatccctgaagagcacaacgtgctggtcaacccggcgcaccccgacgccgcgcggctggcttacgtcaaggtccgccgctggcagtacgacgcgcgcctggtctgaggctcaggccgtggcgcccgcgcgcagcatgtgcttctggatcttgccgctggtggtcttgggcaatgcgtccacgaagtgatagcggcgcgggcgcttgtaggctgccagccggtcaccctgcaacaggaaggcgtcgagctgcgccgcgctgaccggtccgtcgccgcgcgtcaccacataggcgccgacgacctggccccaggtcggatcgggttcgcccagcacggctacctccagcacggccgggtgctcgatcagcgcgtcttccacctcgcgcggatagacgttctccgcgccggaattgatcatgtagtcgatgcgatcgcggatccacaggtagccgtccgcatccaggctgccgaggtcgccggtgtggtaccagccgtgcgcgagcgcgcgcgcattggcatccgggcggttcaggtagccctgcatcatgcaggggccacgcaccagcacttcgccgacttcaccgggcacgcacggctgcatggggtcggtcggctcgccgtcgtcgcgcagcctggccaccaccagctcatggccgagcgcgggcaggcctgccgagccggcgtggctcagctgctcatgcgggtaaagcaccgacatgcacgggcccatttccgtggtgccgtacacctgcaccagcccggcgccgaccttgcggtcccattcgcggatcaggtgcggcgccatcgacgcgccgccgtattccaccagccgcagtgaagacacgtcgcgtgcgtcggcatccggatggttcagcagcatgcccaccatggtcggcgcggcaaagaagtgcgtgacgcgctcgctttccaccagttgccaggcctcgcccgcgtcgaagcggcgctgcagcacctgcgtggcgccaagctgcagccgcggcaggaagctggtgtgcagctcggcggtatggttcagcggcgccaccgacaggcccacgtcctcgcgcgacagcgtcatggcctggtgcatcatcgcgttgtgctgcagcttgctgcgatgggtgtgcaccacgcccttggggcggccggtggtgccgctggtgtacatcaggatgcagggatcgtcctcatggaccgtcaccgcgggcggcgtggcgggctgggccgcggccagcgtatcgagccgatgcgtggcgaaagcgggggcggcatcggggtctgcgtagatgcgcagcgcggtgccgggcgccagttcggcggccttttccaccacgcccgcgccttcctgctcgaacagcactgccttggcgccgccatcgttcaggatgtaggccagttcctgcgcagccaggcggtagttgaccgggttgtagaccgcgccgatgcgcgccgtggccagcagcgtgaagacgaaggccggagtgttgtagaggaaggccgcgaccacgtcgcccttgccgatccccagcgactgcagtgcgtgcgcgtggcggttgacctcggcatcgagctccgcatacgtccacgcgcgtcgcccggcaccgatgccgctgaccagcgcggtcttgcgcggcaggtagcgcgcgggccaggagagggtgtcgccaagggtgatgccgcgggtcaaggttgtactccggtcgtggtccgccggcgcgtcggcaggcggttgttgtcttgtaagccggacaatatagagcggcgggtggggcacatggaaataacgttttgctctttccttatgccggagttgcagtcatgcgataaggctcttgcgtgatactgtatattcatacagttgctgccgcgccccgtttcctgtgtccgccgtcccgccacccattccagccccgcctgccatggcagccgcaccggcctacgtggtggccgtgcgcgcgctgtgcgaattcaccgccaaggcgggcgacctggacctgcgcttcgtgccgacgccatcggcgcaggagggcgtggccgggcatgcggtagtaaccagccggcgcggggaggcctaccaggccgaagtggcgcttgccgccgatttcgggcccttgcgtgtgcgcggccgtgccgacggctacgatcccgtcgccaaccggctcgaagaaatcaagaccgtgcgcggcgatgccgcggtgccggacaaccaccgccacctgcactgggcgcaggccaaggtctacggctgcctgttatgccgcaagctggggctgccggggctggagatcgcggtggtctatttcgacatcatcagccagcgcgagcacccggttgcggagcacttcactgcgcaggcgcttgaagccttcttcgtgcagacctgcgagcagttcctgcactgggcgcaggcggaactggcccaccggcaggcacgcgatggcgcgctggcgcagctggcctttccgcaccagggtttccgcccgggccagcgcgaactggcgcaggcggtctataacgccaaccgcgcgggccgccacctgctggcgcaggcgcccaccggcatcggcaagtcggtcggcacattgttcccggtgctcaaggccatgccggggcagggcatcgacaaggtctacttcctgtcggcccgctccaccgggcgcggggtggcgctgcacgccgccaatgcgttgcgcggccacggcgcgcggccgctgcatgtgctggagctggtggcccgcgacaaggcttgcgagcatccggagctggcctgccatggcgagtcctgcccgctggcgcgcggcttctatgaccgtctgccggcagcacgcgaagcggcgcgcggcgtgccggtgcgcgaccgcgccgcggtgcgcacgctggcgctggcacacggaatctgcccttactacttgtcgcaggagctggtgcgctggagcgacgtggtggtggccgactacaactactacttcgaccgcagcgcgttgctgtatgcgctgaccgcggccaatggctggcgcgccagcgtgctggtcgacgaggcccacaacttggtcgaacgcggccgcgccatgtacaccggggaactcgacccccaatcgctgcgcgaggtgcgccgcggtgcgcccgccgtcgtacgcaagccattgacacggctggcccggcaatggggcgcgctggcacgccagagcgacgatgcctatgaagtcctgcccgaagtgcccgccgtcttccgccgcgcactggacgaatgctgtgcggcggcattgacgcatatgaccgagcacccaggcgcgcaggatccggcgctgcagcgcttctatttcgatgcgctgcattttggacgcctggccgagcagctcgacgcgcattcgctgttcgatatccagcgcgtgccgcgcagcggccgcggccaccgtgcgcggctgtgcctgcgcaatgtcatcccggccccgttcctgcgcccgcgctttggcgccgcgcattcggtcacgctgttctccgcgaccctcgatcccgccgcctactacctcgatacgctgggtttgccggccgattgcgcgcgggtgcaagtgccatcgccgttccgcgccgagcaactgtcggtgcggattgcagcgcgcatctccacccgctatgcgcggcgcgaacaatcgctgccggccatcgtcgcgctgatggccggccagttccgcgcacggcgcggcaactacctggcgttcttcagcagccacgagtacttgcagcaagccgtggcccgcttcgcccagtctcaccccgacattccgcattgggtgcagtcgcggggcatggacgaagccgcgcaggcggcgttcctgggtacgtttgcggaaggcggcgagggcatcggctttgcggcgctcggcggcgcctttgccgaaggcgttgacctgcccggcgagcgcctgatcggcgccttcgttgccaccctggggctgccccagttcaactcggtcaacgagcagttccgtgcgcgcatgcagcaggcgttcgggcagggctatgcctatgcctacctgtatcccgggctgcgcaaggtggtgcaggcggcaggccgggtcatccgcacgcagcaggaccagggcgtggtctacctgatcgacgaccgctttgccgcggccgaggtgcgcgaactgctgccggcatggtgggaaatcgccacggcggcctagaaattacacagccgggccagtctggggcatcctctttgcgcggtgcctgcccgaagtcgccgctggaacgaatctggcaggcatgcggataccatcagccagctatcgcgaaaggatcagatccatgcccatgacccagcaatacgcggccaccgagccgacccgcacggaagtggatgcgctgccgggcgccaccgtgctggaattcggcgcgccgtggtgcggctactgccagcgcgcccagccggcgctggctgaggcctttgccgtgcatccggcattgcgccatctcaagatcgaggacggcagcgggcgccggcttggccggtcgtttcacatcaagctgtggccgacgctggtgttcctgcgcgacgggcaggaagtggcgcggctggtgcgcccgaccgagtcggagccgatccgcgaggccatgcgccgcattgcctagcccggccgcgcgctgccttatttggcgaacacctggctcaggtcgccaaaggccttgaactccagcgcattgcccgacgggtccaggaagaacatggtggcctgttcgcccacctggcccttgaagcgcacatgcggctcgatcacgaactgtgtgcccgccgcgcgcagccgctcggccagggcctcccattcggccatcggcaggatcgcgccgaagtgccgcaccggcacgtcgtcgccatcgacggcgctggtggcgcggtgaccacactcctcgggcgacaggtgcgccaccacctggtggccatagaaattgaagtccacccaggcctcggaactgcgcccttcggggcaaccaagcaagtcgccatagaagcgccttgcctcggccaggtcgcgcacggggaaagccaggtggaacaggggaatagaggaagtcgcgctcatgcgggaggcctttgtcgggggtcgttatgcgggcaggcgttggcctgcgcgttgattgtagccagcacaacccgtaatatgaagcgaatcatttttggcctgagtatcagaattttcaatagatgatccgctacttccagaccttcctggtggccgccgaaaccggctcgttctccgccgccgcggcgcggctggcgctgacgcagtcggccgtcagcacgcagatccggcggctggaagaggacctggactgcgtactcttcgatcgcaccggcaagtcggtcgcgctcagcgaagccgggcgccggttggtgccggaagcgcggcgctttgtcgagctctatgccgcgatgaaggaccgcgccggcccgcatgccgacgccgcgccggtggagctgggcgcggtgtcgacggtccaggccaccttgctggccgatgcgatgcggcatttccgggggcggtttcccgactcgcacgtcaacgtggtgccgggcatgtccacccagctgctgacgcaggtggatgcgcgcgagctggacatcgccgtgctgatccggccgcggctgggctttccgccggacctcaagtgggtgccgctggtgcgcgagggctttgtcggcatcgggcccgccggtgcgcctgcagacctgcgcgcgttgctggagacgcttccgttcattcgctacaaccgccacagcaccggcgggcagctggtggacggctacctgaagcggcagcggctatgggtcagggaagggatggagctggatgagccggccgtgatcctgctgatggtggcagctggcctgggttgcgccatcatcccgtccggactggtgccgttgcagcagtccgcgggcgtggtgcaggcgccattgccgggcgggccgctctatcgcgacgtgggcgtgctggtgcgcgaatcggcactgcgccgcgcgccggtggcggcgctgatcgatgcctttgtggctgccagcgcgcgctggcagtctgccgtggtgtaaaggcgcgatactcagcggctgccgggcaggaccaacgtgaccagcaccgaggcatcggagatggcggtcacgtcgtagcgcacgctcggccccaggtagagcaggtcgccctggtgcaactggcgctcggcgccgtccacccgcacacgcacctcgccctccaggcattgcacagtcatcgggccatctaccgcatggggcggcacatgcttgcccgccttcagcaccagccgcatcacttccagcgggccttccttgaacagggcctgggtggcggtctggtccagccgtgcgcccagtggcagcacgctggcgatctgtccggattcaaggtggggaagggacatgcgcggctcctcgctcttctggtggggtggcttgtcaggcacggccggcgcctggcggcggcacgccttctcaatctagcacccgagcgcgcatctcagaagcactcagcgtgatgtaaccggcgaagtcgccgacgcggcggcttccacttgtgcgcaaggcgtggcattgcgggcttgtgcggtgcgctcggctgcggtcctggcagcggcgcggccgcgctcgatcagagcccagtcagggccggcggccgcgggaaaagacgcggccagggcgccaaggccgagcagcgcgaacaggatggttttcatgagggggccttcagggaggtatgagaaaagagacggggccttgcgccccgtcgacacgccacggcggctgccgtggcgcgggcaggcgccggtcaggcggcagccgatacgcgtgagccgccatgggccggcggtgccgacacgccgctgcggtccatgcctgccacttccatgccggcggcagcgcggttggcgccgtcggtaaacgggtcgcgccggtcgttgacgcgcgcgccatcggtgaaggggtcgcgcttgccattgacgtgcgcaccgtcggtaaacgggttgcgcttgccgttgtgcaggttgtagccgtagcggtcggtggcgacgccgcggtcgttcaggccttgcgccatggcagggctggccagtgcggcggcaccgagtgctgcaatcgagagggtcgtggcaagaagggccttgagagcgtttttatgcatgtctgctgtttttgggtgggtggacggcatggcccgcgaagggccgcgcggggatggcggatctgccacccgcgccgtccgggttcgccttttgggcggtgccgtcgcgtgggaagcgcgcggcacgggacgaagtttagtcaggtcgatgcattcctgtgatgatttaaacgtcgaaaaatcagtcgtttttttcattgccagtcgcattgatggcggccaccttgccgccggcctgccagcccccgccaagcgcgaggaacaggtcgacctggcgcgcggcgacatggccttcggacgcagccagtgcggcctccgcatcggccagcgtgcgctcggcgtccaggtgcgccaggtacgggatgcgccccgcctgctgcaggcggcgctgcagccgcgcagcttctgcggcctgttcgcgcgccgcgtgcagggcgtcgtgccgttccagttcgcgcgtgtaggccgacaacgccgtttcggtttcctgcaatgcgcgcagcaccgcgccatcaaagcgcgccagggcggcgtcggccgcggcttcatgcctgtggatgcgatggcgcacgccgttggtcggcagcgaccagctcagcagcggccccacgctccagcgcgccgtcgggccgctgccaaggtggctcagcacgccggtcagcccggcgctggcgccgatgctgatcgatggatacaggtctgccgtggccacgccgatgcgagcggtggccgcggccagttcgcgttccgcctggcggatatcgggccggcgcctgagcagcgctgcgccgtcacccactggcagcggcacacgcagcgtgggttcggcatggcagtccacctcggcctctggcagtgccgcaggcggcttgcccagcagcagcgccagccggtggcgtgcggcgctacgcgcggcttccagcgttggcaaggtagagtgcagcgcttcggtgcgggcacgctcgcgcgccacgtcggcgggttcgccgcggccggcgtcgaccaggcggccggtggcgtccagcgtgcgttgctgtaccgcgagctgctgcgtggcggcggccagttcatgcgtggcggcgcagccctgcacgtaggcgcgcaccgtctgcgccgccacggtgacgcgcaccatgtcgagcgtggccgcgctggcttcggcgccggccagcgcggcctcgtcggcgcgggccagcttgccgaagaaatcgatcaggtaggacacgccgaaaccgaagtcgcccaggttgaataccggtggcttggtggtctgcaggaagctttcgcccgacagctgcgcgcgcgaaacgctggcgctggcgccgccctgcggcaggttctcggactccacctcgtgcaggagggccaccgcgcggcgcaggttggcgctggcggcgcggatgtcggtgttggcggccagcgcctgttcgaccaggcggtcgagccgcgcgttgtcatagagccgccaccagtcgtcgggcacgggcgcgatggccacgccgggcgctttggcaccctgaagcgggccgttggcggcggccgcgcgcactgccgcatgatccggcacacgatagtccgggcccacggtggtgcaggcgcacaggcaggccgcggcgcacgccagccagggatggcgccgcttcacgaccggggccccgtgcggcggccggcgtcatcgacgcgcctggcttcgcgaacggccacagtcgcggtgcggccggaaaccaggcgcacatccgcgggcacgtcctccagcacgatgcgcaccggcacgcgctgtgccagccgcacccagttgaaggtcgggttgacgttgggcagcaggttcgagcccgcgctgcggtcgcggtcctcgatgccggctgcgatgctctgcacgtgcccgcgcaggtgccggggctcgcccatgatatgcacgtcgaccgggctgccgatgcggatccggtgcagcttggtttcctcgaaatagccttccacgtggaaggacccggcatcgaccatcgacagcaccgggcggccggtcgagacatagtcgcccaggcgcggcagccggtcgttgaggtagcccgccaccgggctgcgcacgctggtgcgctccaggtcaagccgggccagccgcaccgcggcttcggccagcgccagcgcggcttcgccttgctctacgcgggcacgcccctgttccgcgacttcggcggcaaccaggccgtcgagattgcggttgcgcgcggcttcgcgccgcgcctgcgccagcgcggcgcgctgcgtcgctaccgcggccagcgcctgctgcagggccagcgcgtagcggtcgcggtcgatctcgaacaggacttcgccttgctgcacatgctggttgtcgcgcgccagtacgcgtgtgaccagcccggacacatcgggcgccacctggatgatgtcggcacgcacatggccgtcgcgggtccatggcgcggccgtgtagtagtcccacaggtggcgcagcaccagcagggcggcgatggctgccagcagcgttggcagcaagggaagcagggggcggagtcggaaggtcatgacggcagtcccggcaccgcgacaaagactgcggccacggcgccaaggacgatcacatagagggaaaggttgaacatcgagcggtgccagatatgccggtaccagcccagcgcggccagcaccatgcggatcgcggtagtggcggcgaaggccagcaccatcagcaccagcacgcctggcacgaacacgccatagaggtcgatttcactgagcattcggcggcagaggagagttggggaggtcagcgggacagggcagccacagggccaggcagcagcgtgacctgcagcaccaccagcgcgccgagcgtgccgcggtggtcagggcggccacctgcgggcaacgcggccacgccggcgatggcatcggccacccaggcggccagccccgccggagccggcacggcatggcccgcgcgcagccgcgcgcggaaatgccttgccaccgcggccagcacgcggcgcaccggcttgcgtgccgcgggcggcaaggccggcagcgccttctgcagcgccagcgcgcagtagccgacttgcagcgcgtggaagccgtcggacgacaagggatcgccggcagcccccagccgcggcaccagctggccgagccggtccagcatgcgcgcgcccagccgcgcatccccatcggccgctcgcagcgtggcggcctgggctaggtcctgccagctggcgcgcaccagccggtgcgccgccgcgcgcgcgccgaacgggcgtaccgccatcgaccacagcggcgcgaacagcatggctgcggcgctggccaggcaggtattgaaggtgccgaggaaatccgcatcgaacacggcctgcacgttggcgaacgaggccgtgttgaccgacagcagcatcgcaatcaactggaagccgggccgcgcaatcagcaggccaatgccgagatagggcagcgccagcatcgcggccagcgcttcaaaggtgtgcgcgtgcggcacgaccaggaacaggtagccgcacgacaccagcaggcagatcgtgctccagcgcaggaaggcaccggccatgcggcgcggctcgtcgatggccgcaaggaagcagcaggcgatcgatgccaccgcgaccgcgccggcgccgccctcccagcccgagaagatccacagcagccccgcgcagaatacggccaggccgctcgacacggcgccgaacagcagcatgccgtggtcgtggtgatggcctgcagcctccggggccgcgttgccgcgcagctgcggcgcgccggcgctgcggtcgcctatgccttgctgcagggcgcggcattcagcgtacaacgcgcccaggcgctgcagctggtccgccgccgtggcggcgaggctggcttgccagtcgacctcgcccgcgcggctatcggcaagccagccgcccgcggcgaccggaggcggcgtggcagcatcggtcgccagccaggcggtcgccgccgccatggcctcgcgcactggcaacgggatgccgtccggatggccgcgcagcgcgtgcagcacgctctccagcgacgacagcagcggcatcagcatggtcatgcgctggcgcagcgcgcgggcatggcgcagcgtgtggctgccctcggtgtcataggccagctggctgaccagctggtccagcgccaggatgtcggcagcgagccggtggcggctgtcgtcggcgcgcgggctgccggtgagtatgtccgatgcccaggccgacgcgtcggccagccaggtggctgcgcgggaccgcagcgcgggcgccaccttggccgggaagacgaccgagcccaccagcccggcgcagacgatgccgatcacgatttcctcgatccgggccacggcaatatcgaagatctgcgccggcgcgctgaccgccggcagcgcgacgatcggcagggtgtaggccgccagcaggtacacatagctgcgcggcgtgcgctgcagcagcgacaggtacaccagcacggtgatccacagcgcgatcgcacccatcagcacgatcggcatgttgaccagctgcggcaccgtggccaccgcggcggtcgcgcccagcatcgtgccggccacgcggtaggccgccttggaacgggtggcgccggtcaggggatgggaaacgaagtacaccgtcgccatggcccagtaaggccgcggcaggcccagcgccagcgcgatatagagcgccagcatcgcggcggcgaatgccttcagcgagaacagccactgtcgtgcattcggccagctagccatggagcggggtcttcaagaagagttgagggcacgccgcggcctgccgctccacgcttcattggcggcgcggttgggcgggggcgatgtgtggaagcgaagtgtagccaaacctttcgcattccattcatgatttaatattggcctttccattccctttgttcatgggtggcgaaaccggcctgccggcggcccgccgtccctcagcaccatgcccatcgatatccgcgcgctgcgctatttcgtcgagactgcccggctgcgcagctttacccaggccgcggcctcgctgttcgtcacccagtcgaccatcagcaagatggtcaagcagctggaggacgaggtcggccagccgctgctgatccgtgaaggcaagagcgtgcggctgaccgacgtgggccgcgtggtctacgagcgcgggcaggaggcgctgggcgtggtgcaccggctcacgctggaggtgtccgacctgtcctcgctgggccgggggcagctgaccgtggggatcccgccgatggtcaacctgttcttttcaccggcggtcagcgcgttccggcagcgctatcccaacctgtcgctgacgctggacgagcacggcggccaggtggtggagcagctggtggcaagcggcgagctggaggtcggcgccacggtgctgccgggcgacagtggcctggcgctggaaacgcgccagttcggccgctacccgatctgggccgtggggccgcgcaaggccgcgtgggcgcgcgggcgcaccgtcacgctggcggctctgcgcgatgagccgctggtgatgctgacagatgacttctcgctgacgcgcatgctgcggcaggcgtttctggaagcacgcatcgagccgcgcgtggtggcgcgcagcgggcactgggatttcctggcatcgatggcggcggcggggctgggcactaccttcctgccgcagccgctggctgagcgcctgcagggccaggacacactggccatggcgcggctgaccgcgccggcaatggactggaccatggcgcatatctggtcgccgggacgttacctgtcgcatgcggcgcgggcatggctggcggtttgcgaagaggtgcttgggggcggaaagggatcttgaaccggcgcgcttgcggcggcctcatttcttcaggcactggtccggcaggatatcgagcaagaccagcgatttctgcccggccacgtagtggtagcgcagcctgacccccagcttgccgagcaccggcacatccgggttgcggcagatgccgcgctccaggataggcttggccgtcgccatgaactcgcgggtatcgtcacgcgccgcatccacccccgaaaccttcagctggaactcgacgatcttgcccggccgcgtcatgcagccgtcgaagcgggtggtgtcgtccaggtccaccgggccggcgcgcatcagctcctggcaggccatgcgcagctcacggtcgacatcgcccgcggtcaggcgggtcacgccgttcatgcccgtaggcttgccgcgcaccgtgcccagcagcagcgtggccagcccggacagttgcggggacggcgcaggcgtggcggccacggtggcggaaacggcaagtggcccggccagcagggacaggcccaggcacacagcggcattgcgcaaaggatggtggtcggggacggcgggggcagcgggggcagggcgcatgacgcaacgggaacaggattgcatggggttcgcgctgctactttagccttggcgccttgccgccgttgtcaggcgttgtcctacggcgcaacggtggcttgccctggcggccgcggcatgccagtgaaggagagcgtagaatccgggtcgccaagacctgatcgaagtcccgagtcccgccatgtccgtgcagatccgcccagaagcaccgtccgacgccgacgccattgcccggctgaccaccgccgccttcctgacggcgccgcataccagccacaccgaggcgttcgtggtcaatgcgctgcgccgcgccggccagctgacggtgtcgctggtggcacaggcaggcgatgaactggtgggacacgtcgcgatttcgccggttacggtctcatccggcgcgaccggctggtacggactgggcccgatctcggtggcgccggacctgcaggggcagggcattggctcgcaactgatgcgcgcgtcgctggaccagctgcgccgccttggcgccgccggctgcgtggtgctgggcgatcccggctactacggccgcttcggctttgccgcgcggcccgggctggtgctggacggcgtgccacccgagtacttccaggcactggcgttccacggcggctatccggcgggcagcgtgcaataccacgacgccttcaacgccaccgcctgacgggcgggcgctcagagctccagcaccagccggccgccgccacaggcgcgcgagcagcacgccatcatgcgctggttggcctcgcgctcgctgcgcgtgagcaccacgtcgcgatggtcgacctggccggccagcacgcgcacctcgcaggacccgcacaggccttcctcgcaatcgctctgcacatcgatattggcgccgcgcagcgcgctcagcagggtctggccggccgggacttccatgaccaggccggagtccttcagctcgacggaaaagggcagttccttcgacgcatccagcgtgcccagcttcgatacgaagtgctccactcgcagcgcatcttccggccacgccgcgcagctctcggccagcgcatccagcatgcgctgcgggccgcaggcgtagatctgggtgcgcgggtccggccgcgccagcagcttgccgaagtcggcgcgctggccttcatcgctggcgtggacgtgcagccgcgcaccgtgcagggcctgcagttcatccagcatcgccatcgcctggcgcgaacggccgcagtagtggaattcgtagtcgatgccaagcgcacgggcgcgccgcgccatcgcgctgaccggcgtgatgccgatgccgccggcgataaagatcgcgcgtccgcagccttcatcgaagcggaagtgattgcgcggcccgcggatgcgcaggcggtcgccggcctggacgctgccatgcacccaggccgagccgccgcggctgtcggggtcgcgcagcacggcaatttccagcgccccggtgtcgtccggatcgccgcacagcgaatactggcgcgacagcccggtatcgccgcattccacgtcgatatgcgagcccggcgcccagcgcggcagcggcttgccgtcaggcgccgccagccgcagccggaccacgccgtcggcggcgggcgtgacgcgctcgaccaccaccgtgcgggcgatggtgtgcgcggacggttcgccgatgcgcaccggctggtgcacctcgagcagggccgggtcgcggcgctcggggttctgcgcggggtcccattccaccagcaggtgctcagggccgcggaacgaggtgttgggcacataggtgaaggtctgctcggccaggcgcatatgcggcagccggcgtgtcagctcctccaggaagacctgcatctccatgcgcgccaggttcttgcccatgcactggtgcgagccgtagccaaaggtcagctgttcgctggcgttgtcgcggcggatatcgaacaggtcggcatcggcgaaatggcgctcgtcatggtttgccgaagacgtgacgatcagcagcttgctgcccgccggcaggcggatgccgccgacctcggcgtcgcgcgtcaccagccgccgccatgcggcgacggagccgttgtggcgcaggcattcttccaccgcgttggggatcagcgatgggtcgtcgcagatctcgcgccatgcatccggatgctgcagcagcagcttgatggcattggccgaggcgttggcggtggtctcgtgcgcggcaacgatgccggccatcatcatcgaatgcaggtaggagtcggtgacgacatcgggcagttctttctgcttgcgcaggccgtactgcatccagcccgggccggacgggtcctcgcgcatcttgtccaggatgcggcccgccagctgccagaaattgcccacggcatgcgccaccgccacctgttcctccggcttcggccggccccaggtgttgacggtatgggcgatggagtactggcgcagcaggtccatgtcctcttcgggcacgcccaggaaatgcagggccacggtcagcggcacttcccacagcatctggtcgaccaggtcggcgcggccatcgtcgataaagcggtcgacatactcgcgcgccaggcggcgcaccagcggctcatggtgcgccagttccgcgggcgtgaagggcgccatcagcgcgcgccggcgcggcatgtgggcgggctcgtcctcgttgaccagcgtgcggttcatggcatagccataggacgccagcacggcattggcctcgtcgccggtgggcgtgatcttctccagcgcgatcgacgggctgaaggtcaggttgtcgcggaagatcgccttgatgtcttcatagcgcgtgaccacccagtagcccagcctggggctgtagaacaccggctcctgctcgcgcgaccagcgcacgtattcgggcggatcctgctggtagccgtcgccgaagggatcgaattgcgccgcgttgtggctgaccgggcagccgttgggcgcggtcaaggcgctgtggtcgatcgggcagccgctgcgcgcggcgctgggggaggggttggccatgctgcgtactcctggcgaaaaacagggccgtccggtcagggccggacggccattcggtgttgcggccggactcaattgtccagcgtgatcttcaggtcgcggatcagcttggtccagcgggtggactcgctgcgcagcagctcgctgaactgagacggcgagttgccgaccggctcaacgccgaagtccaccagccgcttgttgacagcgggctcgcggattgccgcgaccacatccttgttcagcgtgttgaccacctccggcggcgtgcccgccggcaccaccatgcccaccagcgcggcagcttccacgcgcgggtagcccagttcggcaaaggtcggcacgtcgggcagctgcggcagccgggtggcattggccaccgccagcggccggaccttgccgcccttgataaagccggcgccggcagcgtagtccaccatcatcgccaccacctgtccggcggccacgtccgacagcgccggcgcggcgccacggtagggggcatgcgtcatcgacaggccggcttccaccttcagcagctccatcgccaggtggtgcgggctgcccgcgccggccgagccgtaattgatgccgccctgggtggccttggtctgggcgatgaattccttggcgctcttgaccgggctggccgcgccgaccaccaggatcatcgggaagcggcccagcagcgtcaccggagccaggtccttgccagggttgtaggagagcgatttgtacagcaccgggttgaacaccagcgtgccgttgtcggccgacagcacggtatagccgtcggcggccgagcgcgccgtctcggccgcgccgatggcggtattgccgcccggcttgttgtccaccaccaccggctggccgaccttggccgacagcccctggccgatggtccgcgccaggaagtccgagccgccgccggcggcgtaggggacgatccagcggatcggcttggcagggtaggcgtcggcggcatgcgcgggggcggcggccagcatcggcagggccagtgcgccaatggccaggcgcttgaagttgaggcggggcatgggggcttgtctccttgttggtcagcccggtgtacggcaccggtgtttctatttcgcgtaaatcatatacgcattgcgtaatgattgaatgcgggttaaccttgaactgtcctgcagcggccgcatggcttgatccgccttccatgtgatgaccgctcaccgtttgccggatcttcccgccatgccccgaccgaaagctgcccaacctccgatcgaacccgccgacgcgccccgcacgcgcgaacgccgccagcgcgtgcaatcggcggtcaccggcatggccgtgctcaagggactggcccggctgggcggacgcgccagcctgaccgcgctggccgcgcatatcgacgaaagcccggccaaggtgcaccgctacctggtcagcctggtggaagaggggctggtggcgcaggagacgggcacgcagcaataccacctgggcttcgaggcgctgcagatcggcatggcggcgatgcgccaggccgacccgatccggctggccgaagcctcgctggtacgcctgcgtgaagcgctggaggtgacctgctttgtcgcggtgatgggcaacaaggggccgaccatcatgcgctttgaggaaccgggtttgccggtgacggtgaatgtgcgcgcgggctcggtgatgccattgctgtggtcggccaccgggcgcgtgttcctgggcctgctcgatgaaaagcgcgtgcatgcccaggccgaggaggagctggccgcggcaagtccggcgcggctggcgttgctcgatggcaaagaccccatcggtgcgctgcgccgcgcggtgcaggccgacgactgcgcctgggtgcgcgacaccaacctgaccggcatcagcgccgtggcggcgccggtgcgcgactacaccgggcgcgtctgcgcagtgctgacggcgctgggcgccaccggcggctttgatcccgccatcgacgggcccatcggcagcgccgtgcggcgcgaggcgcgcgcggtcagcacggcgctggggttcaaccccggggcctgatccgatcgctcagcgggtgaagccgccatcggccagcagcgaacggccgtagccagcgctactgtgttgccggcctgaccggacgcaggctcgtacaagcgatgaccgagattgcgctcgatttcctgttcagatcagcagtctggcggaggcgcagcggaattttacgaatccgggccaatcctccttatgccacctcgcgcagcgcggtttcgcgcggcatggcagcatcgccaacgtgccgcaccgacggataccccgccgcaaacaccagcctcccgccagaccaggtatgcgtgaccatcggctggcctgccacgccggacacggcgatcacgtccgcgcgcagccccggcgccaggcgcccgcggtcgtccagcaggcaggcgtcggccggattgacggtgaccagcgccagcgcctggttcagcggcaggtcggccaggcgcgcggcggcatacgcggcggcgatcagcgtggacggctggtagtccgagcacaggatggtgcccacgccggcgtgaatggcgtcgatggcgcgcatcgagccgctctggctcttgccgcgcagcacgttgggcgcgcccaggatggtcggcagcgcctgggcgcacgcggcttgcgcggtttccaggttgatcgggaactcgctcatgcgcacgcccagcgcgcgcatggcggcgatgcgctgcggcgaatcgtcgtcatggctggcggtggggatgcccagcgcatgcgccctggccaccagccggttgacacgctcatgcgcgccttccagcgcggcggccttcttgtcggccgcatcggcggcttgctcgcggctcatgccgtggttgcccatcatgtaggccaggtaggcatccatggtcttgaactggccctggcccggcgagtggtccatcacggacagcaggtcgaccacgccctcggccatcagggattccagcaccggcacggcgctggaatcggtgacttcgtagcggcaatggatgcggttgtcgaccaggctgtggcggcgatacgcggccagggtgcgcaccagcgtggccgcggtatcgacattgcgcacgccgaactggttgcccgcgaacgacagcgcgtggtacggcgtggtgatgccggccgcggcgttgcggcggtcgacctgagccacggcaaagtccagtgggaacagcacgctggcgcgcggttcgacttccttctcgatggcgtcgcaatgcacgtcgaccaggcccggcatcacggagtggccatgcaggtcgatcacggtggcgtgggtggggaccgctgcgggtgccggttcgatggcggcgatgcgaccatcttcgatcagcagcgcgctgtcgtgcagcacgcggtccggcagcaccagggtggcgtgcgtcaggtaggtagcagacatgtccggctccgttctgggatcaaatcaggcaagggcgctagcgggttgcagcggcagcaggcgcgtggccacggcatcgcgcacggcttcatcgtggaagatgccgatcagcgcgcggccttcggccaaggcttcgcggatcagctcgaccaccacggcgcggttgtcggcgtccagcgaggcggtgggctcgtccagcagcaggatcgggtggccgccgatcagcccgcgcgcgatgttcacgcgctgctgctcgccgccggagaaagtggccggcggcaggtcccacagccggcgcggcaggttcagccgtgccagcagttctgccgcgcgggcgcgggcctcctcatggctggcgccgcgctgctgcagcggatcggccaccacgtcgagcgcgccgacgcgcggaatcgcgcgcaggaactggctgacatagccgatcacgtcgcggcgcaacttcagcacgcgttgttctggggcgtgggtcagctcgacccacggctcgccctcggcgctggtatcgcgcaggcggatgctgccttcggtggccaggtagttgccgtacaggcagcgcagcagcgtgctcttgccggtgccggagggcccggacagcaccaggcattcgccgcgggtggcatcgaaatccatcgcgcgcagcaccggcaggcggatgccgccctggttgtgcagcgtaaacatcttgccgaggccgcggacctcgaccagtttctgggggtggtgttctgcgtgcatcgtcgtcagccctgcaggatggaagagaccagcaactgcgtgtacgggtgctgcgggtcgtcgaggatctggtcggtcaggccttgctccaccacgcggccgccttgcatgaccagcgtgcggtgcgcgagcaggcgcgccacggccaggtcgtgcgtgaccagcacggcggcgaggcccaggtccgccaccaggcggcgcagcaggtctagcaggcgggcctgcaccgacacgtccagcgatgcggtgggctcgtccatgaacaccaggcgcgggtgcgtgaccaggttgcgcgcgatctgcaaacgctgctgcatgccgccggagaaggtgccgggcacgtcgtccagccgggccaggtcgatctccatcttctccagccaggtgccggcgacctcgcgcaggttgccgtagtggcgctcgcccacggccatcaggcgctcggcgatattggcgccggcgctgacctgcatgcgcaggccgtcgcgcgcatgctggcgcacgaagccccagtcggtgcgggccagcagccgcaggcgcgcgctggacagcgtggccaggtcggtcaggccggactcgcgcatgtcgtagctgacgctgccgcgctgcgccggcgcctgcatcgacaaggcctgcagcaacgtactcttgccggagcctgattcgcccaccacgcacagcacctcgcccgggtacaggtcgaagctgacgtcatggcagccgtgcaggccgtcccaggtgcgcgtcaggttgcgcaccgacagcagcggggtggcgctcatcgggcacctccggcagcggccttgacggcctgggccgcctggcggtcggcgcagtattcggtgtcggagcacacgaacagtcgcgtgccggcgtcatcggtgatgatctcgtccaggtagctgtcggcagcgccgcactgggcgcagcagctggaccacttttccaccgtgaagggatggtcggcgaagtccaggctcctgaccgcggtgtacggcggcacggcatagacgcgcttctcgcgcccggcgccgaacagcatcagcgcggggctgcggtcgagcttgggattgtcgaacttggggatcggcgacggccgcatcatgtagcgctggttgacgatcacggggtagtcgtaggtggtggcgatatggccgtgatgcgcgatgtcctcatacagcttgacgtgcatcgcgccgtactcggccagtgcgtgcatggtgcgggtctcgccctcgctcggctccagccagcgtagcggctcggggatcggcacctggaacaccatggtctggcccgcgtgcaacggcgtttccggaatccggtgacgggtctggatgatgctggcctcggcggtgcgctcggtggtctgcacgccggtgacgcggccgaagaagcggcggatattgatggcgttggtggtgtcgtccgagccctggtcgatcaccttgagcacatcatccttgccgatgatcgcggccgtcacctggatgccgcccgtgccccagccatagggcagcggcatttcgcggctgccgaagggtacctggtagccgggaatcgccacggccttgagcagcgcgcggcgcagcatccgcttggtcgactcgtccaggtagccgaagttgtagtggtcatcgcgggcaatgcccgttgccatggtggtgtcgggggtggtcatgccagcgtctcctcttgcggttgcgcctgcacggtagcggtcacggcgccatcctgttccgcacgcagccggcgcagcagttcgaggttggcctggaagtccacgtagtggggcagcttcaggtgctgcacgaagccggaggcctcgacgttgtcgctgtggtacagcatgaattcgatatcgttggccggggcgtcggcggcctcgcccagttcttcggcgcgcatggcgcggtcagccagcgccatcgacatggccttgcgctcgttgtagccgaacaccagcccgtagccgcgcgtgaagcgcggggcttcgtcggcattgccggcgaactggctcaccatctggcattcggtcagctcgatctcgccgatggtgacggcgaagccaagctcttccacgaacagttcgacctcggccgcgccgaagcggatctcggccgcgaacgggtgcgagttgccgtagccgcgctgggtggaatagcccatcgacagcaggaaaccctcatcggcgcgcgccaggttctgcaagcgcgcggcgcggttggcggggaagctcagcggctcgcgcgtcaggtcgggcggcgtggggtcgcccgcgggaatctggtcggcttcgaccagttcatccgcttccagcaggccggtcacgcgcggcatgctggcggcgaggggttcgggcgagggcggcagcggctcggggtcgcggccggcttcgagcgtgaaatccagcaggcgctgggtgtagtcgtaggtcggccccagcacctggccgcccggcacgtccttgaacgtggacgagatccggcgctgcaggcgcatcgcgccggtatccaccggctgggtatagccgaagcgcgccagcgtggtgcgataggcgcgcagcaggaagatcgcctcgatctggtcaccagcggcctgtttcagggccagcgcggccaggtgcgggtcgtacagcgagccctcggccatcacgcgcgacaccgccagcggcatctgttcgcggatctgcgccagcgtgagttccggcaccgcggtatcgccgcggcggtaggcatcgagcatccggtaggaattgaggatggcgcgctcgccacctttgacggctacatacatgtcagtcctccaccagcgtggtgcgcgtcagcgcgcagaatcggtcgccgctggccagcagcaggtccacgccgagcgggaagccggcgttgttggcgcgccagccggcgcggaagtccgcgggcagccccgccacgcgcagcacctgcgtggtttcgatgccggggccgcgcagcgtgagggtgtcgccttcggcaagcgaggccacctccaccagcagcgtggccgagcggtcggggaaggccgggtcgccttgcgcgcaatccgccagtgccggtacggcatagccggcgggcacgcagacaaaggcggcggcgccgacatcgtcggtcagcgggcagccgcaatggaagcgcaggaacgcgcgcgccgcggcgggcacgccggcaggcagccagaccggggtatcgggatcggccagcgtcagcagcagcgccgccagcgcgggcgacaggccgccgggcaggccgctggccacgggcagcgtctgcagccggcccggatgggcaaacgcctgcagcgcggcgcggaagacctgctgggcgtcgtcgaccgggttgttgaagcccggcagcagcgaggcggccggggcggacaggatcggttgcatggcagtcatttcagtcctctccccggaccatggtgaagaactcgacgcgggtctgggcgacggtggctgctgcgtgtgcggcgcgctgcgcctgcgtgcttgccaacggcgccagcacgaactcctgcacgcgctggtgccaggccgggcgttgcagcagcgcgtccagcaccgcggcctgttcggcgtggcgggcgctgcggccctggatataggccacgcctgcagcggccccggcagcgccgtcttccagcacgaccgcgcagcgcgtgaccgtgatttcccccaggttgaactgggcaccggtaccgcctgcgcgggcccggaccatggccatgccggactccggcttgcgcagcagccggtaggccggcagcgcttgcgcctggccaagccgctggtaagcgccgtcgagcgcgtcggcgggcgccgtcgccaggatccggagccaggcggcgcgggcggcatgggcctgcgcggtttcgctttgcatcatcacccctatacgtctatacgtttagatgtcactgcttgaacacgcagctactagaccacaggcagatgaacgtttcatgacggggcggggcattgctcgggcaccccgccatcgcggcgcggttgaggcacaatcgcatggcaatggtgaacgcttgatgacaagagggcagcgcgagatgtctgatcgagaagtggaacggggttccggcgtggcggtatggcgccagattggcgaggcgctggcggacgacatccgcaagaagctgtacctgcccggcgaacagctgccccctgagcctgaactggccacgcgcttcgcggtcaaccgccacaccatccgccgcgccatgggcgagctggagttgagcggcctggtgcggatcgagcagggccgcggcaccttcgtgcaggagcatgcgatcgactacgcgatcggacgccgcacgcgcttctcgcaaaacctggccgcgcagggcatgcgcggacatgccgagatcatcgacagccaggtggtgcgcgcgccggaagtggcaaagcaactgggcctggcgcgcacggcggagatcctgcacgtgcagatgatcggcaaggccgaagagcgcaccatcgacgttgccgagcattactttgacctcaagcgcttcccgggcatcgacgaggtgctgcgcgccaggcaatcggtatcgcgcgcgctggcgcatttcggcattgccgactacacgcgcaagtggtcgcgcatcacggcggccatgcccagcgccccggtggcgcgcctgctgaaccagccgaagacgcgcccggtgctgcaggtggaggcgctgaacgttgatatcgacggggcgccggtgcagtacagcgtggtgcggtttgcgggggactgggtgcagctgacggtttccgacagtgattgaggcggagcgacgtggcattggtctagacatccggctgtcatctgcctgcgctaaggtgtctgcggtccagaccacaaaaccagggcagacgccgccgccgggcgccgggcgccgctggtaaccttgccgcatgaccttgccagcgcaccgttacgccatctacctggcgccctcagatccgttccgcacgtttggcagccagtggctcggccgcgacgccgataccggcgccgcgctgcccgcgccggcgggcatggcggcggcgcccgacgaatgggtcaaggccccggcgcgctacggcctgcatgccacgctgaagccgccgttccggcttgtgcagggcagcaacgggccgatgctcgacgccgctgcgcgtgacttcgcgcgtggccgcgaggcattcgacgcaccgctggcgctgtgtgcgctgcggggttttgtggcgtggtgcctggccgatggcggatcgccaccgatgcaggcgctggccgatgcctgcgtactggcattcgagcgcttccgcgcgccgcccacggccgaagaactcggccggcgcaaaccggaccagttgaccgacgaagagcgccgcatgctcgacgcatggggctacccgtatgtattcggtaccttcgtcttccatatcacgctgactggcatgcttgatactgccggccagcgcgccgccctcgagcgcctgggggccgcgagcggcaagctgctgcaggcgccgcttcatgtggacgggatcagcgtattcgtgcagccggagccgggcgacgactttatcgttgcccgccactacggattcaacggcagcaccaccgacggcgccggcgcggcgcacctggacgcatgaacgcacatggcgcggccgacggacacggcctgttctacctgatggggccgtccggcagcggcaaggactcgctgctgcgcgcgctgcgcgaacgcctcgggccggaccaccgcatcgtcatcgcgcatcgctatatcacccgcgaggccgatgccaacgaggcctccgttgcgctgaccacggatgagttccggcgccgccaggcgctcggctgcctggcgctggactggcacagccacgggctccattacggcatcggcatcgagatcgagcagtggctggccagggggctgacggtgatcgtcaatggctcgcgcgagtacctgccccaagccgtggcgcgctacccgaagctgtgcgcggtgcatgtgcgcgtccggccggaggtgctggccacgcggctgcgccagcgtggccgcgagtcggaagaagcgattgcccggcgcctggcgcgcgcggcgcaggccttcaccgtgccggcagggtgccgcctggtcgagttcgacaatagcggcgccctggaaaccgcggcggaggcgttcgcgcggctggttggggctacctccgatagcgcaacattaagctgataaggccgtgccgaagcgaagcttccggcacggccttgccatcagagttcgatgctgaaactgatgccgtgctcggtgaacccgagccggcgatagaactggtgggcctgcaggcgccgcgcgttggacgacagcaccagcttggccgccccggcctcgcgggccaggcgcatcgcttcacgcatcatcgccttgccgacgcccctgccgcgcgcggacggcgccaccaccacggcctcgacaatggcctcgggacgcccgtcgtggaccatcacgggaaataccagcaggctgaaggtgcccagcggcacctcgtcctcgtccaccatcatgtagcagcggtagtccggatagcggcgcatggtcgcgtagcgctcgcgcatggtggccagcggcagcggcgcttcatcgtccatcgcggccagcagcgcggacaggtgccgcagttccgcgtcggaaccgcgcacttcacgcagggtaagcacggcttcagcgatggtgttcatgcgccagtccgcgcgcaacgcgcggccatgtccaggtagtgcgccagccgcggcgtggccaggccgaccaccttggccaggtcgtcgtagcggcgcaggcgtaccgcggcagcggcgtggcggctggcggtgaacgcttcggcctgtgcggcgccgaacggaccgccttgcagcgccaggctttgcgctgaagccggtgacaaggtggcgaagtacgccggatcggccgcgcacagatagcgcttggccgctacgtgcagccgcacgggttctgtcacttcgtcaccgaacagttctgccagcgcatcggcggcggcctcctggtggcgcatgtcggtggtggtgctttcggccagcagcaggtggccaacgtcgtggagcagggccgcgacgatcagcggctcgggctcgccggcctgctcggccagttgcgcgcactgcagcgcgtgcgcggtctggctgatggcttcgccgccgtaccaggcattgccatggtcggcaaacagcgtttcgatgcgggacaggttcagcatgatgtcagaccagtaccttgcggatttgtgcggagatgatgtcgatggccgagacgaacaggatgatgatgatcatcacggcacaggtctgcccatactggaagctgcggatgatctcccacagcacggtgccgatgccgccggcgccgacgatgccaaccaccgaggccgagcgcacgttggactcgaagcggtacagcgcgaacgacagccacagcggcagcacttgcggaatcactccatagacgatctcctcgatcgggccggcgccggtggcgcgcacgccttccaccgggcgcgggtcgatggcctcgacggcttcggcgaacagcttggccagcacgccggtggtgtggatccagatcgccagcacgccggcaaacgggcccagaccgacggccacgatgaacagcatggcgaacaccatctcattgatggcgcggcaagcgtccatgatgcggcgtgcgggctggtaggcccacgccgggacgatattggccgagcacagcaggcccagcggcaccgccatcaccacggccagggcggtgccccacagcgcgatctgcacggtgacgagcatctcgtccaggtagtgccgccagtcgcggaaatcgggcgggaagaaatcggcggcaaatttcgccatattgtccgagtcgcgcagcaggtccagcgggcgcatgtcggccccctgccaggacagggcgagcatggccagcaggactgcccaggtcagcatcacggcaagggaagtgcgcggcgggcgcacgttgctttggggcgtgggaggcaggccgggcctggcggtgacagtcatggggaatccggaatcaagcggggaacgaaagcgatgcggggccggcggcggggggccgccggcctcgtcgggatgggcttattgcgtgctgatggcgttgccggcggccttgtccagctcggccaggcggcgggtcacctcggccagccgcttttccttgtcggcagcggccagggtggtgtccgattcgatcttcgccttttcgcgggccagttcgatctggcggatcggcaccagctgcgcatcgctggcggtgcggaagccctggtaggtcagggtggccagcacctgcttttcacgcgcggcgtctgcgcccttgccgtagttggcgaagaaggcctggatcttcttcttcacctccggcggcaggtccttgcgatagaccatcggatcggccgggatcagcggcgacttccacagcacccgcacctggtcataggcgttcttgccggtgttgatgcgatagcgctccatgttctcggtgttgttcaccgccacatcgacctgcttgttcagcaccgacagcaggttggtctcgtggttgccgatgcgcacggccttgaacagcgtcttgggctcgaccttgttggcggtccacaggtagaagcccggcacggccgtgcccgaggtggaattggggtcgccggcgccgtagctgaggtccttgccgcgcttgatcacgtcttcgacgctcttcaggtcgctgtccttgttgacgatcagcaccgaccagtagcccgggttgccgtccttgtcgatcaccgaggcaaagacctcgccgttggcacggtccacggcctccatggccgacttgttgccgaaccaggcgatctgcaccttgttgaagcgcatgccctcgatgatgccggcgtagtcggacgcaaagaagggcttgacgggtacacccagcgtcttgctgagatcgtcgatcagcggctgccaggcggacttcaggttcgacgacgattcggtcgagataaagccgatgttcaggctcttggcgtcttgcgcgaaggcgggcagggcgaccacgcccgaagccacgacggcgagaaaggttctgcgaagcatggacaactccggtgggaagcggttttgggataaagcggtgtggacaggcggccgttcaggcggccgccaggttcatcgtgaccattgccggtgccggcatggccgcagtggatacgtcttcgtctggcacggaatcgagcagcagctcgtcggcttcggtgccgtagagatcgcgcagcatgccgggcgtgagcgcggcagaggggccgtcatagaccaccttgccgtggcgcagcgccaccacgcgggggcagtagcgcatcgccacgtccacctggtgcagcgacaccagcaccgcgaccttgcgcgtgcggttgatctgcctgagcagcgacatcacccggcgcgacgattccgggtcgagcgaggcgatcggctcgtcggccaggatcacgctggcgttctgcaccagcgtgcgggcgatggcggcgcgctgctgctggccgcccgacagcgtcgaggcccgttgaaacgcatagtcgtctataccaacttgcgcaagcgcatcgagcccgccctggacttcatcggccttgaagatgcgcagcaggctgcgccacttgggcacacgggccagcgtgccgaccagcacgttggtgatgaccggaagacggcccaccaggttgaactgctggaacacaaacccgatctcgccacgcaccttgcgcacgttgcgggccaggcggccgttgcgctgcacatggcggccgttgacgaggatttcgccggcgccggcatcgcccgtgatgaatccggccacgtggcgcaacagcgtggacttgcccgatcccgatgcacccagcagggcgaccatctcgcctggcgcgatgtgcagcgtgacatcgtcaagcgccttgcggtccgcgcggaacgatttggaaagcccgcggacttcaattgcgtgcgtcatgtcgactccctgacgtgaatgacctgcgcattctggccggggcggatgacagaacgatgacttgagcggaaggggggctgaaactggttggcggcgccggcggccatgctggccgccggcgccggtggggtcaggtgcgcgtgatcgagacgccgccatccaccagcgatgccgtgccggtgacgaaagccgaatcgtccgatgccaggtacagcaccgagcgcgccagttcttccggcgtggccacgcgcttgagcgcatgcaggttggtgatgaacgcctgtgattccgcggtgtcgttcatggtgcgatacatgtccgtgtccacggcgcccggcaggatcgcattgacgcggatgccctgcggcccatactcggccgccagcgcctgcgtcaggccgatcaggccggacttgcttgccgcatacgcggccacgccgggaaaggcgacggtgtagccaacgaaggtcgaggtgaagatcaccgaaccgccgccatccttcagcatctgtgcaagctggtgcttggcgccgaggaatgcgccggtgagattgatggcaagggtgtcgttccagccgtctgccgaaaccccggtgctgggcccgccctcgccgagcgtgccggcgttgttgaaggcgatatccaggcggccatagcgctcgaccgccagcgccaccagcgcgctggcgtattcctcgcgccgcacatcgccggcgagcgccaccgcgtcgccgccggcgtcacggatctgcgccaccaggctgtccagttcggactggcggcgggcaccgactaccaccctggcgccctcggcggcaaacagcaatgcggtggcgcggccaatgccggcactggcgccggtaatgatggcaacttttccagacaaacgtcccatgatcgatctccggtctggcgcgggggcaacttgctggtccacagcgccggttttgcgggtagggcagcaggaaccgtcctgctgcctcgtgaaaccagtatgggcaacgcgcgtggttcgaactagactgaagatcgcggaacaactttccggatatgccgaacaatgttcaagctagaaggtgtcgccagctttgtcgccgtggtcgaggcaggctccatcagcgaggccgcgaggcggctcaacttgtccaagtccgttgtcagcgaacgcctggccgagcttgaaaaggcgatgggtgccaacctgctgcgccggaccacgcggcggctgtcgctgaccgaggatggcgccgccttcctggagcgggccacgcgcatcctgcatgaagtggaggcggcggcaaccgatgttgccgagcggcgcggcaccctggccgggtcgttgcggatttccgcgccggtcacatttggccggatgcacctggggcctgccatctatccgttcctggcccggcatccggaactggagctgagcctggacctggacgaccgccgcgtggacgcggccaccgacagttatgacgccgtggtgcggcacggcccgctggagagctcgcgcctggtggcatggcagcttgcccccagccaccgcctcctggtcgcatccccggattacctggcgcagatgggcgcgccggcaacgctggcggagctgcagcagcaccgtggcatcttctacgccaaccgcggcgcggctgactggcgcctgcacggccccgacggcaccgaaatcgcccgtgccgccgttgcgctgcgcgtcaacaacggcgacatgatgcgagatgccgccatcgcgggagtcggcatcgcgttgttgccgacctttattgccggcgatgccatccggcagggggcgctggccgtgatcgaggtcggcctgcgggccgagccggaatccatttatatcgcccacccggaaggccggcgggtgtcggcgcggctgcgcgcgtttgcggagtgcgtgcgcacggccatcggcagtccgccgtactgggacgcatgggcgcaggcacgcggggagggcgcgggaacctgatgccggctgctggccgggttccacgatcgccatgtggcggccctgcaagcctggaggtttgccgcccgcgccgcgcggcctgtattctagtgctctgcccggcgccccgtttccgcaaggaggcagggcgccatgcacttcacatcgagccggccatacaggaaccccatgcaggaacccgaactggatgaaatcaatatccggatcctcgaggcgttgcagcgcgacgccagcctgaccaacgtcgagctggccgcgcgcgtcaacctctcgccgtcgccttgcctggcgcgcgtgcgcgcgttggagcagcgcgggatcatccggcagcgcgtgacgctgctcgatccgcagaagcttggcctcaacgtcaacgtctttatccacgtgtcgctggagcggcaggcgcgcgaggggctggatgccttcgaacgcgccgtgcgcgcgctgcccaacgtgatggagtgctacctgatgacgggcgatgccgactacctgatccgcgccgtggtggccgacgtgcaggccgtggagcggctgatcgtcgacgagatcacgcgcatccccggcgtcgccaacatccgcagcagcttcgcactcaagcaggtgatgtacgacacagccttgccgctgcgcaatccgcgctagcccggcgttcggcgtgggatatgccgcggcctcagcattttcgagtggtttttatggtgagcggcagtggattgtgctgccacctgccggataggcagtcaacttcagcacctcatgcgggagggcactccatagaatgggacaaaacccattggagacttccccatgaccgaccttgcctccccacacgcccgcctgctcgcccaggccatgcccgacggcgacgacgatccgcaggagacgcgcgaatggctggacgcgctggaggcagtggtggcgcaatgcgggcaggagcgcgcgcgcttcctgctcggccggctgctcgatgccgcccccgcgctgggtgtgtcgaccacggctcagagcaacacgccttacctgaacaccatcccggtcgagtgccagccgccttatccgggggatctggcgatggaagagcgcatcaccggcatcgtgcgctggaatgcccttgccatggtggtgcgcgccaaccaggcctacggtgaactgggcgggcatatctccagctatgcctcggcggcggacctgttcgaggtcggcttcaaccacttcttccagggcgccgatgccggcaacggcggcgacctggtctacttccagccgcactcggccccgggcgtgtacgcgcgcgccttcctggaaggacgcctgtccgaggcccagctcgacaacttccgccgcgaggcgggggggcagggcctgtgctcgtatccgcacccctggctgatgccggacttctggcagttcccgaccggctcgatggggctgggcccgatccagtcggtctaccaggcgcgcttcatgcgctacatggagcaccgggggctgcaggccacttcgggccggcacgtgtggggcgtgttcggcgacggcgagatggacgagcccgaatcgatcgccgcgctgccgctggcagcgcgcgagaagctcgacaacctgacctttgtcatcaactgcaacctgcagcgcctggacggcccggtgcgcggcaacggccagatcgtgcaggagctggaagcgctgttccgcggcgcgggctggaacgtgatcaaggtgctgtggggcagcgcctgggacccgatcttcgcgcgcgatcactccggcgcgttgctgcgcgccttcgcctcgaccatggacggccagttccagacttacaaggccaaggacggccactatgggcgcgagcatttctttggccagaacgaagcgctgaaggcactggtcgcgcatatgacgccggatgaggtggcggcgctgaaccgcggcggacacgacctgcgcaagctccatgcggcctttgccgcggcacgcgcgcacaagggccagcccacggtgatcctggccaagaccatcaagggctatggcatgggcaatgccggccaggcgcagaacaccacgcaccagcagaagaagctcgacatcgaggcgctgaaggcattccgcagccgcttcggcctggagctgtccgacgaggacctggaatcgatgcgcttctaccgcccggccgaggacagcgctgagctgcgctacctgcgcgaacgccgccaggtgctgggcggctacctgccggcgcgccagcgccaggccgacaccgtggcggtgccgccgctggcgcaatacggccagttcgcggtggcggccgaccagaaggagatgtcgaccaccatggcaatggtgcgcatgctgaccggcctgctcaaggacaaggcgctcggtccgcgcgtggtgcccatcgtcgccgacgaggcgcgcaccttcggcatggccagcctgttccgccaggtcggcatctattcatcgcagggccagctgtacgagcccgaggacgccggctcgatgctgtactaccgcgaggacatccgcggccagatcctggaagagggcatcaccgaggccggtgcgatgtcgtcgtggattgccgcgggcaccgcctacagcaaccatggcacggccatgctgccgctctatatctactactcgatgttcggcttccagcgcatcggcgacctgatctgggccgccggcgaccagcgtgcgcgcggcttcctggtgggcgctacggcaggccgcaccacgctgtccggcgaagggctgaagcaccaggacggcaccagccacatcattgccgccaccatccccaactgccgcgcctatgaccccgcctacgcctatgagctggcagtcatcgtcgacgagggcatgcgcgcgatgatggagcgccaggaggacgtgttctattacctgaccgtgatgaacgagaactacgcccagccgtcgatgccggcgggcgtggagcgcgacatcgtgcgcggcatgtaccggcttgcgcaggtggaaggcggcgggcgcgccagggtgcggctgctcggcagcggcaccatcctgcgcgaggtggaggccgcggcgcagatgctggccgaggactggcaggtcgacagcgaggtgttcagcgtcaccagcttctccgagctggagcgcgaggcgcgcgagaccgcgcgccagcgcctgcatcatccgcaggacagcatcgcccccagccatgtggaagcgctgctggccggcgacgcgccggtggtggcggccactgactacgtgcgcgcctatccgcagctgattgcgccctacgtgccggctcccttcacggtgctgggcaccgacggctatggccgcagcgacaaccggccgtcgctgcgccgcttcttcgaggtcgatcgcgcctatgtctgcgtggcggcgctgcgcgcgcttgcggcgcagggcacggtgccggcgtcggtggtggccgaggcgatcacgcgctacggcatcgacacggacaagcctgcgccgtcctcgctctgatatcgccggcttcaccttgcaggccaggcggggcgcttcggtgcgggactccacatgcgacggcggcggctgttaagctttgtccttctgcagccgctccagttgcgcgtccgtgccgccacgggcgcgcaccgccatggtccggcgccgcccccccagcatgatcgccaagcgccggatatgaaacggattcctgttgcccgcatcgccaccatcgccatggcttgcagcctcttcgcggccaatgccagtgccgccgacagtgtcggccagcgccagatagaacgcgctgtgaacgatgccatccgccccctgatggcggcgcacggcgtccccggcatggccgttgccgtcacggccggcggcaagcgctacgtcttcaactacggcgtcgcggcgaaggagggccggcgcaaggtcgacggcgacacgctcttcgagatcggctcggtcagcaagaccttcaccgcgacgctcgcgtcctatggacaggcccgcggcaccctgtccctggccgaccctgccgggaaatacctgccggcgcttgcgggaagcagcctgggcgcgaccagcctgctcgacctcggcacctatgccgccggcggcctgccgctgcagtttccggatgcggtcaccgataccaggacgatggtcgactatttccggggctggcgccccagatatgccgccggcagccatcgccagtattcgaatcccagcatcggcttgttcggctacctggccgccagcagcatgggccagcccttcgatgacctgatggagaagacgctgttcccggcgctgggcctggcccacacctacatcagggtgccgaaggcgcgcatgggcgactacgcctatggctattcgaaagacggcaagccggtccgcgtgacgcccggcgtgctggatgccgaagcctacggcgtgaaaaccacggcggccgacatgatccgctttgtcgaagccaacatcgacagtgccggcctggacgacaagctgcggcgtgccattgccgggacgcacaccgggtacttcaaggtcggcgacatggtgcaggggctgggctgggaaatgtacgcctggcccacacgggtcgacagcgtgctggccggcagttcaccgcaggtcgtgctcgaggcgaaccaggtgagccggctggagccgccgctgtcatcgcccgccgatgtgctggtcaacaagaccggctcgaccaatggctttggcgcctacgtggtctttgtgccggcgaagcggattggcatcgtgatgctggcgaacaagaacttcccggtaccggagcgggtaaaggcagcgtttcggatactggcggccctggacggtgcgccgggacgggcggataccccgtaaggggagggtggggctgcgtcatgcatcgcaggcctgtccagcggctggtccgcaaaaaatccggctttccatggaatagtccacgccctccatgtgtatacgcaggtaccccccggccgccggctaacgccaggcccggtagaaaggagaccctgcaatgcaacggagaaccccaagcaatggcgtcggcaccgcggcacgcatcgtgccggcgctgcttctatgggctgcaagctttgccgcgccagcccaggaaacccaccaccatcaccaaaccactgcggggcaggtgccgccgccctttgtcgccagcaccgcaaaaccgtttgccggcctgatgggtgacgccatggccgtaatggatcacggtatggcgcaggcagccatgaacggcatccccgaccacgactttgtcaccatgatgattccgcaccaccagggcgcgatcgacatggccaaggcgctgctgctgtatggcaaagacccggagttgcgcaatcttgcacaggccatcatcaccgagcagcaaaacgagatccgcctgatgcaggcctggctccagcgcagccaggccagggcacctggcgccaccaatcctcgctaaccggcggacatacaccgcccgcttctggaccgaatcatgaaaagacatgcccttatccttgccgtggccgcgcctctcgcagtcgccgcgccgcagccacaggatcgcgtttacaccgccgaccagaacagcaacaccgtttcagtgatcaatccggcgagcaacaccttgcttgggcagatccgccttggcaacgcgcggccggacgtgctgtcgccgctttacaagggcgagctcaatgtccacggccttggcttctcgcccgaccatcggaccctgatcgcgatctcgaacggctcgaattccgtcgcgttcatcgataccgcgaccaacaaggtcaagggcattgcctatatcggccgctcaccgcatgagggcttctttaccgcggatggaaaagaggtgtgggtagtcgtgcgcggcgaagactatatctccgtcatcaacccggtgacattccgggaaacccgccgcatccagaccacggcagggccgggcatggtgctgttccatcctgccggcaagctcgccttcgtggtgtccagcttcaaccccgtggtggatgtcatcgatgtcagggcacacaaggtggtcaagcgcctcagtgtcaccagcccgttctcaccgttcctgcagttcacgccggacttccgcgaggtgtggatgacgcacaaggacgtgggcaaggtcacccgcatcgacaccgagaaactggaagtgaagggcgtcttcgactccggcttcatcaccaatcaccttgcctttgccaggaccgcgcgtggcacgttcgcctatgtgacagtgggcggcgaaaacgtggtcaaggtattcaccaccgaggccgaaccgcggctggtcgcgaccattccggtcggcgcgctgccgcacggcatctgggctgccgatgacagttcacgcatctatgtcgggctggaaaacggcgacgccgtcgacgtgatcgacaccgcaacgaaccaggtcacgacccgcgtgccggttggccaggcgccgcaggcactggtctatgtctccaacgcagtgccaggcggcgacgggaccgccaaccttgtgcagagagcgaacagcgatccggtcaacatcgcccttaaaccggtccgtggcgatgccaagggctttgtggtcgcgcgcaatctcggtgtcgtcgacgcattggaagtatccctgttcaagctgaagccgcaaaccacgtacagcgtctatgtcgcagggcaggccacgcccgtggcaagcttccgcaccaatgcggccggcatggccaacggcaccgccattggcccgctgcgcgaagtcgtgacgacgctttcgccaaaaagcgccgcgccagcgaagctgatcgtcatggagggcgatgcggcggcggatccggccgcggcggtgttggtgagcgtgccgtgatctgagcgtggcgacctgggttggcggatccccggctagagcgccaggatccacccacccagcgccgcgccggccaccaccagtacgggggacacgcggccgtagacgagcaagccgaaggccgccagcgccaggccgaaatccgccttcgagtggatcgcgctggtccacaccgggtcgtacagcgcggcggccagtacgccaacgacggctgcattgatgccacccatcgcgctctgcaccccgtcgcgctggcgcaggctttcccagaacggcaatgcgccggccaccagcaggaacgccggcgcaaagatcgcgagaagcagtaccagcgcgcccacccatccacccaatggcgcgggcgagagcgccccgaggtacgcggcaaaggtgaacaggggacccggaactgcttgtgctgcgccgtagcccgccaggaatgcatcgttgccgacccagccagggggcaccacgccagcctgcagcagcggcagtacgacatgcccacccccgaaaaccagcgctccggcctggtagaagaccgacacggccgacaccgccatcgaaccagtcattgcggcaagggccgggagcagcaccagcagcacgccgaacaacgcgagaagcaaagcgccgacccggcgactcacaccgtagttgagatgctgggcaggaggcagatggttcagctgcaaggtccagcgcgcaaccaggccacccagcacaatggcggcaacctggcccaccgcacttggcaccgcgaggaccagaagcgcggccacgaccgcgatgccggcacgcagccggtccggacacagcgacctggccatgccccataccgcctgtgcgacaaccgccacggccgccaccttcaggccgtggactgccccggaatccgcaacgccggaccagcgcgcaatgccaaaggcaaacaggacaagtgcaatcgcagagggcagggtaaagcccatccaggcggccagcgcgccaagccagcccgcccgctgcagccccagcgccatgccaacctggctgctggctggccccggcaggaattgacacagcgcgaccaggtccgagtagctcttgtcgtccagccagcggcggcgctcgacgaattcggctcggaagtaaccgaggtgcgcgatcgggccgccgaacgaagtcaggccaagtttcaggaacgcccgaagaacctctggagccgtgccacgtgtggtggttgcgtcagcggcgcggtttgagtcctgggcggggttggtgggcatcggcggtttctcggttaaggcttcatcggccagttatgcctcccaaattcggccttaccatatgcggaattcctgtggctccgcaaaaggcgtggccgagcagtcggcttcagtccaacaaaaacccgccctcgaacggggcggcgtagttcgcgtcggcgcgcaacgcttcgaactccggcatgtccgcgaacggcgtcacccgtatatcgacctggcagcgccattgctcaagcgaatcggactggatggccagtgccaggtggctcttgtgcttgcgcgacggataccggaaaccgaccggcgctccatcgccagtcaagtcccaatgatttttgacgtcgacatcagctgatcagatccgaactgcgcgagggcagcgcggtcaactgcgcgatcacccagccctgccgctcgccggcggattgtgcaaggtggccacgctgcgcggcggtaagtgccgcgcgcgattggaacgccttgcccgccagcatttcggcaggcgtcaggtcgtcgaaggcatcgaccggggtgacccagaacgcatggatttcgctactcggcaggttcttcatctggcgcagcaccggaaccagcagctccggcaccggcggcgcgaattgccaggccgggaaggcgcggccgatcgccttgccgcgcggggtgacacagtaaaagcgtgcatcctccactgcgcggtatagtgtcgcctgcgacatggccaccagaccctgtgcaatgacctccgagggcttcagatatgacacggcgagccggttctcgacatctgccgccggcgagccggggtgtccgagcgttgccgtcaggcactggcgcacgatgtccatcacgcgggcacgttcgcccacgtcgatggtgtgttccagttgctcgtcgatgtcgtggaccaatttctcgaccagttgggggccgaccgcaatggcggccggcacgtgggtacgcggtgtcatatcaaactccatcagatgacaacccggggcggggcgaaggcgggggggatgctcgcttcgcgatcagatcgcgcacaggacaaccgatcttgggctaacgacgctagagccaacgccaggacggatcgggattggcacctgcactttactcaactttctcaggattctcaagtttctcgcagggaccttgcgccggtcgatctgccgcatcgtcatggtaatggctcctgctggcatgacgggctcccgcgcgctggaagccgtcaagcttacgcctgccaaactcggacatttgaacttagccagaaccggacattaccgcttagccgctacattctatgcgcgcataataagtgttatgtcaaatcccatccgtagctctgcaacccaatactggcgcggctctccgggcacctaagcaccgatttccaagcgcgtcgacaatttatcccccacgtgtcacccggcaccgtggggttttttcgtcatgggtcacaaatgccacaacaacaatacgcaatcccctccgaattcgcccattgggcgcgcagcatccctcccgaatatctcgcccgctatctgcgggtcacccctgccaccgcgcgcgcctggcagtcaggcaagcgcccggcgccctggtggaccgtgcacgtgcttcggctcgataagcttgagcgcgacgagatggcccgccagatgggctatgcccacctcctgccgaagctggggattgtcagcggcgacgtgatccagctccggccacgacgcgcgcagccgaaaccggcgccggtcgggccggccagtgtcacgccgctgccggaacccggccagatgcaagcctagtccttgccgatggacgtgtttttgtagaagttgttgggcaggccggtgaatgactccatcgaatacttatcaccatctgccggcctgtcctgactcacgtagcatcccgtgaacatctgcacgcacggctggcccgatatgtcgcgcttttcctctgcctgctgcgattgccccatggtcatggacagcgccatgtgagccgctgtcccagcgccggaaaccatatcgccgtacgggttcttcttcagcatttccgcggtgccccgcgccacctgttgcatctggtcctcggtgccgacatagcgaagcccacagcccgccagcgccagcatcatcactcccgtcaacatcgttcgcataacccctcccgttgttttccggcagtgtaacgaaaaaaacccggcctaaagccgggcaatcccctgtgcagcgcgatacctggttagcgcttcttgcgcttccggaactggccgttggccttgcgcggcggcgtacgtcgtttcttggttgccatgctctctcctgttgtcaccacaaaacgcggccctgctggtccttcagcgtgaccgtcccttgatcagcgatccacgtcttgagccccggaaagcgcgacaggatgacggcggcgcagatgacgccgccgatcacaatcagcgtttcccggccgatctcagccggcgtgggtatccagccgcggccgctcatcggtgcccctcgatgtgacggtcgatgcgttcatgcgccctcccgatgtccttgcgcatgttgcgcagatcggcacggatgccaccgtaggcggccccggcccccatcagcaccgtgaccaggtacttgagcgcatcgaccgtcagcgcgtccattactcggcctggcccttttccggcaggaacactgccagcgccgacagcacggcggcgaccaccgcggacacggcattgaccttggtcggattggcgccgacgatcaccgccagaccggacaggccggccatggtggacggctcgcgcaaacgttgcagaaatttcattgtgctttcctcactcgcgggtacacaaaggccgcaccgcccgcgttctcggtgacagtccacgcattggcaggccgcgcggcaaacgtgccggcgtagccgtccatcgaataatccggcgtgcggtcgctgcccaccagcgaactgatgaacgtgccagccgggcaggcaaacgacgcatcccaggtgcggccctcggcaagcgcgcgttcgcactcggtcatgtccgtgcggggcacgcccagcacgtcaccgatacccagcaccgccccgctggccgcatcccccaccgcccccaccagggcgctcgctgcacccgcagccacaccctgaatcccgccgtttttttttacgacataggcgatcgccgcgatggcggcgccggcgagcaacagcttggcggtcgtgtctttcatgtcagccgcccgtggcccagcccaggtagttgcccaggctcgggctctccacctgcgagccgaacgtgtaggcaccgttcatgctgccaaactggcccggcgtccagccatccgtggcgtcaatgccgagctggccgatgtagccgttctgcgcgttgtattccagcgcgttggacagcccgccgccgaacacgcccgtgaccggcgcgccgctgatcacggcatccggcgagcccgaacggaacgcgccgatgatgctcgacaccagccccgcgcctgcggaggcgtaggcaatattccgctgcgcgctgtagtcaggccgcagctgcgccgcggtgcccatcggcacgcctgtggccgccgtcgcggcgcgcgatcgcagcgcgaggaacgccatcgcgcccaccgctgcaatcagaagcaaatccgggcctccgccccctgccgctgccttagccattcactacaccccctgccgcttgatatgcggcctgcaatcgttccagcgccacttccggctggccgtacccggcgccgggcatggacgcccaaatcttgcgcaccttgcgcaccgccagcgcgaagcggcccgcgtccacgtcacccagggcgcccgcttcgcggatcagttccagcgccgccgcgtcctggctggccggcgagaagtccgtcaggcccagccgggcggccagcgtgtcccacgtgcggcgcaggaactggtaggcgcctgccgcgctgctgctgatcggcttgccgttcgacagggcggtcaccacctggcgcggatgatccgcgaaggaatcgaacttcccgccgccgaacagcatgcggtatccgtcattgcctgcggtgccctccccggtgcgaatcgtcagcaggaaggcggcgcgattcagttgtgcttgccccatgtcggtgtcctcagtgccgccgaagaagttgccttcggtggcgtcgtaaaacaggttttcggcctggtcgatgaagtccggcgactgcgcgcccggctcttcgctgcgctgccagtcgcgccacaccacgtagcccacggcggccaaggccagcagcgcgaactcgtagcgcgtcatcagatcgcttcctcgaagaactccgccgtgactgtcagattggtgttatttgccgtgccaaaccacattacgccctgccctggctccagcgtaattggctcctgaaacaccttctgcgcgatcacgttcgcggccagattggacgtaaatatcgaattgagacccccctccccgcttgggcttgtagtcgtgtcttcgcggccctgcgcgacactcgccgcgccccacttctttggcacaatgcacgccgcgttcgcgcttccaatcgcgctgttcttccacgtcatgccaaaggcttgtgcggtctggctcgatacgtctgccgtcttcactaccagccgcttgccgctgccgactgggttccacagttgcggcgtcggcctgtgcgtcgcgtcaccgatagtattgaaggacgccagaaacgcggcgccgcccagcgtgcgggccttgccgccgtcgatcacatcgacggtgccggcaatgcgctggtcgaagaagtcccccgatccaatcatcaggtatccggtcagcgctacgcttccccggttgaacactacccagcgcgttacctgctcgctgaatcggaagccctgccccggcttcaggctgatattgccctgcgcgaagttgggccgaatctcgatctgcgcgaacgggtctgccgccgacaggaactgcacgcggtccccggccacgtcgatggcctgggcaccacccgcagggatgttcaggtcgtactgctgtacggattcaatgatgcccacggtcaccccttcattttcgatacggccacgatgcccgcgatcgcgagcgcgccggccacaaggaatttctgaccggtgccaatctcctgcacgttgtcataggctttcgccacgttctgtgtggccgtttcgttcaccgccctggcggtgctggccgtgtccttggcgaaatcgatcagcttgcccatgccggccagcaggccgtcagcgttgatcctggactgatccagattcagcttgaggccgtctcgcgccatccctaccgcgtcggcagtggacttgtaggtggtttcgctgttcgtcttggcgaaatcgaacgccgccgcaatggagccggcatcggtgtagctgaggttggccgatacctggtttccgtcgcccgacaccgagatgccgccatcgttgacggtgcggcgatccacgttgttcgtggttgccgccgtgctgctggcgttgctgctggaccggttgcaaggcgtggccggcaggcccagcgccagctgcttaacttgccacggcttgagaatcatggtttccccgcttgcgcagcgtcacggcctctacgccgtagccgatgcgcttcagtttcttgatgaggccgggccggcacgtctcgatgcggatcgcatcgaacgccgcgcactgccgctcgatcagcggcagcaccccggccacaatgtcaaagtccgcgccgccataggccagcgcaatctcggcctcggtgccgtgcgcgtactggtgtccgcgcagcacataccaggccaccggctcgccgtcccgatagacccggcagaaggtgccgcccgccacgcactcagccggcgccatcaggccccggctggtgtcgctcttggcgtgcgcgccgaacgcgctgtcaacctcggccagcagtgccggcgtccaggcttccggttcgatcctgatgacggtttccatcagccgcgccgtgcgaaggcgatggcgaccgccgcagcagccagcagcaccattgggttatttaacagcgacagcgcgttatccgccgtcgcctgcacagcgctggtcagcgtcggcaaggcgcgcgcctcactgcctccggtggctaccgtccagcctgagccgtcgaaatgctggtcaaacatgcccccgcccgacactgccgccttattgccatccgggccacccagcgtactggtcagcacctgcgacgcgcccatgatggcggcggtgtacgggttcgagtacatggcggcagatgccgccccgcccatggccggagtcatcagggcttcccggccagcaggtagatgacggcgcccgccaccagcagcggcatcaggccaccaccgaacagcgcagccgccggcgtggagccgcgcggcgccgtggtcagcaccgcaccgcccggcgtgatgaccgccgccgtgttggtgttctgcagcgcccgcacggtctgcacgtcgatcagacgcgacagcccgtacttgagcaggtccgccccgctctgcgccagcgggttcaggtcgctggcgtcaggcgccgcactcaccatcggatcggtgtagtacgactggggctgaatgctgtcggtccaatcacccatgacgcccccttacaggttgaacggcaggtcgatgcactcgacgtagacgtcgatgccgtccgcagcggtcaggaacgcattgaactccagcgccgccgcatcggcggtcttgagggcgcccgactgattgttgtcgaaaatgaagtccacgcagtagtgcttgggctgcggcaccttgcgctgttcctgctcgatgaagcgcgccacgcggctggtcgcgtcccataccaccaggccgtttttcttgacctcgacgcggttcaggttgccgtccgtggtcgacgtccagtccgtgccggtgtagatcatgtggatacgcttcaggagcgcacccttggccgagaagttgatggggaacttgcccgccacgctggtggaggccgggaaatacagcagcttgtggatcagctcgcccgcgccctggccttgcggcggcgtgaggaacatgtagccggtcagcgtcggcgcggtggcgcccgcgatggtgatttccagattcatgttatccggccacgcggtcaggtcgaagccgcccacttccttgccgtcgatgctcggcgcgtcgcgctcggtaaagtcgatggtcaggaagttggcatcgtcgtagatgcccttgtacttgttgatcaggtccagcgcggagcccttcacgttgtacaccgtgcgggcgccgatcttgaccttgatgtcggtgatcatcgccttcgtgagcgcggtgccgcccagggcgagcacaatgcgggtcagcgtgttggagtagcgcgggatctgcagcgtggcgacgccgctgttgaccacgttcaggaacgggggcagttgttggaggattgccatttctcggtgtccttttcagccggccagtgcggtggcgacgatttggtttgccaccggcacgcggcgggcgacgtagatcacggccagcaccagcgccgtggtcttgattgcgttcttgatctcgctcatggcgttagcccagcagcttggcgacggaatcgggcaggaacttcttgccctgattgatgatgaccagcgcaatggcggtcatcgccacggccttgccaatgtccttcacgctcatggttttctccccgaaagtgcgtgtctgcaatgtcggggctagcccccgcttgagccttcactatgggcaacccaagcggggcagcgcaaggggcgcccgttacgttacgttgggcgcgggttcggccaacgtacgtacgttacgtacgggttttggggtgttgctccccagcgacggcagcacgccggagacggttttcccggtctgcatgtcgcgctcgatgaagtcaaagcggcccgcgtccttgtcggccaccatggcccgcacctggtcctgcgagaccgccagataccgactcatggtgcggacgtcgttctcgtcgttcaggcggctgcaatggatcatcgtgcagttgcccaggaacgtcttgtcgatcagcgccgggcgctgcgtgaccccgaaaatggtcagcgcctcatgccggccctggcgcgacagcaccgaccacgaatccggcgtctcggccgggctcggtccggtcacgtccgccagctcttccaccaccaggcacaggttccccgcggcgaacaccagctcgcacagcgtgtcgaacttgtccgggtaggtcttcttgcgcttgccgggccggtagacgatccggaaaggcccatcgctgccagccgtgaccacggcctcgaccacctcgcgcaggtcggtcatgacctcgccctggtcgtattcgcccagcggatcccagatcagcaggcgcggcgggttgccccgatccagtacgctcttgagccatcggctcttgccgcttcccgacgcccctacgacgccaatgattcgtgcggtgttatggcttcccgccatgtcatccccttacggcaggcaagcgcccgcccgtgtcttccatgttctcgcccaggtgcgaccgcgactgcggcggcaccacctcagcgggcggcgcgttgtccaccgtacgttcggcgtcctgctgttcgcgccatgcctggtgcgccacgtacgtggacagcgccagcggccccgccaccagcagcaggccgatttccggcccggacatgagcccgcccacgttgaggccgtacttgtcggccaccggcacgatggcggcggccagcgccttgatggtgtccttcgtgtagatgctgggcaggtacggcaaggccggcgacagcaccgtgaccagcagcgtgagggacatttcccactcgacggcgggatcaaccggctccggctcgcccggcagcagcggcaggccctcgggctcgaccgattccgccgcgtgcgccttgcgccggagcatgtccatggtattggcgtcgatcacccccatacggatagctccccttgttccagggcgcccggccccggcgtggcgggcatggtttccgtaacgttacgtacgtacgggacgccatcgcccaggatgaagcgttcgcggatgcgttcgtcggcctcgtcagagcgcgcgaagagctggatcccgcaaccgggcgcggtgcagttgatgcacacccgcccgtttttcatgggagaccagcgcgcgccctggccgcacaccgggcaggtgcattgggtcatggcttaggccccctgccctgccagcagcgcggcgttgaggatgccggcaaccatgtcggcggcggtggtgttggccggcatgttggccaacgcggttacgccagcggcctgcatggcctcggtgggcgcggtcggcggcgagagctgggcgtcagccatgcccaggaccatttcggcctggtggtgggcggcgccgtacgccgtatcgccagtgtcgcgcacatggggcttgaggctctccacggcggccagcagcgcctgcatttcggtcaggatggtcattgcttttgctccctcagttcatccagcgccacggccatgtcccgcagcagttccttgacggggcgcggcagcacgctcccgaaaaccagcagcgccgcatcggcgcgatccttgaaagacctctcttccacttcgtttcccctctacgttggcgcctttcggcgcgaaatccgtttccgttacgcgtaacgaaaacccattcagtccttgtgcatcgggaacggccactcgctctccgcatatcgcgacgccggcgaccccaattccgttacgggtttcgtcgtaacggaattggcgagcccgctgcgcgcggcttcgagctcgccacgcagtgatgcaatcacggtgccggagtcgatggcgttctgccgccagcggcgcagcgcgatcagctcgtcgttgagctcgtcgatggtttcgtgcgcttcggccagctcggcccgcacggcggccagctcttccgcgagctcgtccgcgtcgccctggtgcatcaggtcgggcacgcccggcgcggcgtacgtggaaatgccgtccgccttgaggcgcgcgcggtatttggcctggcgctcggcattggtcatcgcgccgggcttgcgcggtcgcccaggccggcgcttcgtttcgacctcgggcaacagctcgcccgtcacgttgtcggcggcatcacgcatggcgtacccctttctgcgctcttggcttgaccaggtcagcgagccggccgggcggcttgcccgcgcggcccgccgcgacctcggcggcaaaggccgcttcccgcgccgcggcttcggcggcggcagcccttgcgccctcgcgctgggcccggatgcgctcggcgtgttcgggcagccagtcatcgccctgcgccttgtcgaccaggctggcgaggaacttgaacggggaacggatgcctccggcctcgatagcgccccgccattcgtctaaaaccgcttgggataggtcagggcctatgggcgacagtttttttgcaatgtcggcccttctggcctgcgcgatgccgatcggccagtgcaaccgatcctcccaggcgaggccgcccccctcttttgcaagccggcgcgcagcgccctcccccaccgcatcggccggcccgtggcgttcctctgagggcgcgaagccttcgggttcgtgtgggtgttgggggtccagctcgccctcccgcgccgaaggcgtggggggctgttgatactccccccggcggcgaagccgttggggggtagggggggaagggtttaaggtgttaccggtatccggatgtgtgtcggctttcgcgttttcgggtctgtcggcttctctgtcggcttcttccctgaaacccgcgccgttattgccttctgaggtgtcggcttgtctgtcggattgacctgtcggcttactgtcggctttttttcggacgtttttatccgtgtcggcgagcggacagaaaaaaacgagctgcttgtcacgcgacccgatgcgcaccaggccgtgtttaacgagctgcagcgccatgcggcggatcgcctcgatgctggggatggtggccttcacgcccggcctgggctcgatgtagagccattccttgagcgcctgccaggagatacgcggggccagtcctacggccccggtgcggaagtccatgcgcggacgaatcgccatcacgtacatgcagatggcggcgtagtccatgccggacagggccgacaattcggcctcattgagtttgagcgcgggcattgatggtcacagcacccaatgcacaatcgcgaagaccaccatcaccagcaccatcagcgcccaggcgatcacacccgcgtctgctttctctcgcgccatgtcagcagccctccgccttgttgatggcattgccgaccagcaccagcgccttgcctaccttcggatcatcggcgtggcgggccagcgcgacatacgctgcattgagcgcctccagcagttccggcgcggtggccatcaggcgcgcattggcttctgcctccgttccaggacttgcgcagtacaccactcccacttccatcaggaagcggtcgccccgctggctctcgggatagatatggcaaatcgactcagcgctcttaacgttctggtggttccacgttgcgaaccacggacccggcgtatgggaattttgtaacgacatgtgaccacccctctatcctcaccctgccatttggaagatccccatcggggaagaggcgccgcctgccagcggatcaggccggccctggcgggtgggattccaggcggcggcgcgtctggtgtgaactgtagtcaccctgggatgacacgtcaagcatggatgacgtcatcctccattgcgcttgacagtcatctcccgatgactatccttcgtcccgggtggagtgcttttttaaaggggtgaaagtgatgaaaactactcttgaatacgtcgacgcggtcaagatcaggcttgacctgccgtctgattatgcgattgccaagtccctcggcgtgtcgcgtcaggccgtcagccagtaccgccagggcaaggctgcttttgatgaccttaccgccgtgcgcgtggcggaaatccttggtctgaatccgatggaagtgatcgccgctgccaaccgtgagcgggcgaaaagcgaggatgcgcggcgcgtgtggaccggccttttcgaccgtttcgccgcaaattttgagacgctctgcgagcacctccggatagcccagaccccgcgtctggcctagcccgcagagctttttccggatgggactaagtgttatgttaaatcaagaaggttgcgccgctggctggagcaagcgctgcgtgcagtcagtgctccaacgcaaaagtgtgcacgaattcgtcggatttagccccgaaagtgactctgtgatttcttttgagacctcgtgcacatcattgcgcaataggtcgacgcctctgcattccgtgcatgcctttctgcctccaacgcacttgtataacgtgcgagaatccctataagcatgattcctgtagacgtccggtgggctccgattcgaagatgcctcgcccgtctagaccttcgatgctgatattcctggataccgagttcaccaatctcactaagcgaaaattgatcagcatcgggatggtgtcggaggatggccagcacgctttttaccgagaactacgggatttcgatctcgataactgcagccgttttgtacgagccaacgttctacccctgctcgggcgtttccaggatgcggccgtcgatcgtgcaaaactcacagatgacctcagacagtggatcgacacccttccccgcagcttaaccattgcctgtgatagtgactgggattgggagatcctttgtgagatcgtaggaaatccactcccggcaaacatctccggacgatttgatctgcgtccgctcattgacacgaccgttttccacaaggccgtgtgtcgctaccacgatgattctcatcaaccgtggcaccacgcttggcatgatgcgcatgctcatcgttttggttggctggcgtggaacgatacgcggagacgcgcgaagctgtaaaaagtggccaactcgctatcaagatcaaatgctcagtcctcaggttccgacggcagtgtcgcgcatcaccacaacgcccggatcgcaatgatcgtggcccgcctggttggcttcctcttccttttcaaattcggcggcttccgccaagttcggcgtgtagcctacgtcaccatccttcgggcaaacctggtagctgcgatcgagtgggcccatgatcagtgttacccacctcgtcgttagcccaaggactttatcgataagttgggaaacctgttccgtagtgtcaacgactgaactgggctctgttgcaaagattcccgggcgaaaatcctccaggagctcttccagcatctcgcggatgtaatagatcgccccgtccccttcagtcgataacccagccgcggtcagcagtccccggtaattcatgagctgaactaggcgctcaactcgaatgcacccttcttggtatgaaatcatttgctttatctccccaagggtgcccttttccgctgtgtatattcgttggcgctgcacgccgcttgtctactctagctttccctcatcttgcaaggctgctatttcgacaaggtcaactgcccagaaaagtcgtttgtgtacgcgctctatgatgcattaaggttctcacgcgatgaactgagacagatgttgatagagctaggattgatatcctccggctcacgttagctcccaccatgagtcaaagggactgcgattcctgctgactcgaacttttgactccgcagccgttacccagttcgaaagttgggtggagaccgagacgtgcaaagaaggcttgaggatggagactgcccaaatccgtgatcgaatggcgcctcccggccatgagcggccaatggctttctacgatgcaacggccgaatctgtacagctaacagtcatccacaagatatgagcgcaccaataaccaccacggctgtccctcaattgcccagcctatcaagaccataagaagctcatttgacggcacaatcaagagctgagatttcgccagagcgaaccagtcggtcgtcacgttaaaccctaaagtaggtcacctccacatctccagccgtcgcggcggcacacatagccgaagactgcgaaaggacgtgctccgcgaagaaaagcgccgtggcgatcttggcggcgtagaagttcggatcctcggccgattttgcatctgcagcgagcatcgccctggccagttgccagccggaaaatacgatgccgcacagcttcaggtacggcacgctgccggcaaagaccgcgttcggatcagccttggcgttggcaacgacaaattccaccacggcttccagcgcggcgcggcccctggccagctgcgcctgcaccgcggtgaaggcagcgccgccgtgttggcccagcgcggcttcggtttccacaatctgcgcacagatagcgcgcgcgacggcgccgccgtcgcgcacggtcttgcggccgaccaggtcgttggcctggatcgccgtagtgccctcgtagatcggcaggatgcgagcgtcgcggtaatgctgcgccgcgccggtttcctcgataaagcccatgccgccgtgcacctgcacgccgaggctggtgacatcgatcgacagttcggtgctccagcccttcaccaccggcaccatgaactcgtagaacgcctggctctgcccgcgcacggcttcgtcgggatgctggtgcgccgcgtcgctggcggccgcggccacgtaggccaccgcgcgcgcgccttcggtcagcgcgcgcatggtcatcagcatgcgcttgacgtcagggtggtggatgatggtcaccgcctcgcgcgccgaaccatcgaccgggcggctctgcacgcgctcgcgcgcaaaggccaccgcctgctggtaggcgcgttcggatacggcgatgccctgcatgccgaccgagaagcgtgccgagttcatcatgatgaacatgtactcgaggccgcggttttcttcgccgaccagcgtgccgatcgcgccgccatggtcgccgaactgcagcaccgccgtggggctggccttgatgcccagcttgtgttcgatcgagacgcaatgcacgtcgttgcgcgccccggtgctgccatcgtcattgaccaggaacttgggcacgatgaacagcgagatgcccttcacgccttcaggcgcgttaggagtgcgggccagcacgagatgcacgatgttctgcgccatgtcgtgctcgccgtaggtgataaagatcttggtgccgaacaccttgtacgtgccgtcgccctgcggctcggcgcgggtgcgcaccgcggccaggtccgagcccgcctgcggctcggtcaggttcatggtgccggtccactcgcccgagatcagcttgggcaggaaggtggccttctgggcgtcggaacctgccgtcagcagcgcctcgatggcgccgtcggtcagcataggacaaagcgcgaatgacaggttcgccgagtgcagcatttcgtgacaagcagtcgcgatcaacttcggcagcccttgaccaccgaactgttgcgaatgttgaattccctgccatccgccttgcgcgaattgctggaaggccggtttgaaccccggcgtcgtgatcacctcctcttcctgccaccggcttggctccagatcaccgactcggtttagtggtgcaactacttgctcgctaaacttggcagcctcctccaggacagagtatgcggtttcccgtgaagcctcctcaaatccaggcagtctattgatagcctcaagaccggctaaggtgtccaagacaaaaaacatttctttaagaggagcacggtacgtcattggctagtgtccctaaatgagcgaatttgagcgaagtgcaagaaggctgggggctattgcctggaacatgaccaagacatagccaaggaagtgcgtcacctatgtcctcatcaggacagcgcatgcgccttacgattgcggatggcctcatagcgcatcgcgtaatgccatcccaggtcggctgtcggtctggcctttcggccagtctcgacggcatccgcagcggcagcgttgccttgccgtgccctctctgcaataccaaacataatggcggccaacctgaacaggttgtaggcaatgtagaagtcccagtgctcgagacccgcactgccgttggcttcggcataccactgcaaatatgtctgttcgctcgggataccgaggcctgcgaagtcgagatcagcgataccgcgccacagcgatgaagggatgtgccagctcaggcaatgataggcaaaatcgacgagcggatctcccagcgcggacaactcccagtccagcaccccgattaccctggactcgctcgggtgaaagaccagattgtcaaggcggaagtcgccatggacgagtcgcgtctcctcgaccgcggggatgttccttgggagccagctcatcagcgcttgcatggcggaactttcgagcgcgccagtggcgcggctctggcgcgtccatccggcaatctgacgcgccaggtagttaccgacaggactgtagtcggcaagccttacggcctggacatcgatgcggtgcagcgctgccatcacgcgattcatctccgcgtagatggcactccgctcggcgctttgcatacccggcagcgattggtccaccattaccctgccatcgaggtactccatcaggtagaacgggctgccaaccacggacaggtcttcgctgtacaagtacacggcggggacgggcacattactgccctggagcgcgctcatgacgcgaaactcgcggtcgatggcgtgcgccttgggctggatgtgcccggcaggcttcatccgcagcacgtagcggtgtgcaccggaggagaccaggaaagtcggattggactggccaccggtaagccgggtggcagtaagcgatgcctggttgatcagcccgcgcgcgtggagcagccgggccagcgcgtcccaattgcggtaagtcgtatcgttcattggactgtcctttggctggtgtgggaaatcgcgtgacgcatcagagcgagctgaccagatgcccgccgtcgacgggcaatacggcgccggtgatgtaatcggatgcccccgatgccagcagcagcaaggcgccatcaagctgggagggctgtcccaggcgccgttgaggaatccgccggaccatcgcttgcccgctggccgtgtcgaagaaggcgcgattaatctccgtagcaaagtaccccggcgctagtgcgttgacgcggatgccatggcgcgcccattccagtgccagcgattgcgtcaggtggatcaaaccggcctttgcggccgtgtatgcgggaacctgctgcgccacccgcagacccagaatggaagcgatattgatgatgctgccctgccggccagcttcgcgcatctgctgcgcggcgtactgcgccacacgccaggcgccggtgaggttggtatcgatgacccgcgcccaatcctgctcgctggtctctagcgcgggcccggtggttgcaatgccagcactgttgacgacgatgtccacagttccccgcgcctgctcggcctggaagaatgcgccggatacggaatcggggtcacacacatccaactgcacaacacatccgtctgcgcccatcgcccggatctctgccagcaagcgctccccttcggcgagtcggcggccggcaagcactacgcggcatccagcgtttgccagggtcagcgcgaagtggcggccaagcccgccgaatgcgccggtcacaagtgccactttgccctccagatcgggaaagacaggttgtggacgaggtggggaagccatatttgcagtctccttcgacgcggttgtcggagcgcaggttaagccatcacgtctgggaagccagccacccgaacggggaggcacctcacaatgcccccgggggcaaccctcaggatgcccggtgcctcccctattggggggctggaaagccgtgccacggcgcttacgctggcaggcatccggcgtccctggcgctgcatgcaagtcatggcgcatgctgcccaggccgctgccacagcgatcaaggagctcctccgtgacacggcctaccccaatccaccgcacgccgtcggcgtatgcctatccgctgctgatcaagcagctcctgcacgcgccgctggcggtcaatccggaacaggaaatcgtctaccgcggtcaggtgcggcacagctactggaccatgcggcaccgaatcggccaactggccagcggcctgcaatcgctcggcattgcacagggcgatacggtggcagtcatggactgggacagccaccgctacctcgaaagctacttcggcatccccatgatgggggcggtgctgatgacggtaaatgtgcgcctgtcgccggaacagatcgcctacacactgaaccacgctggcgttaggcttctgatggtccacgccgacttcctgccggtcgtagcggcaatccgcgaccagctggaatccgtcgagtgcctggtgctgatcggcgacgacacgctctctctcgagagcgcgccgttggccgaaggctttgtcgccgagtacgaaacgctgttggccgcttcgccaccagactatccctttcccgacttcgacgagaacgcacgggcaactaccttctatacgaccggcaccaccggtttgcccaagggggtgtatttcagccatcggcagattgttctccatacgctggcgaccatggcggcactgaccagcgcgccaactcagggacgcgtgcatcgggacgatgtctacatgccgctgacgccgatgttccatgtgcatgcgtggggaatgcccttcgtggcaacggcgcttggtatgaaacaggtctatccggggcgctatgctgcggaccaactccttcagctggtgcagagcgagcgcatcaccttctcccacggagtgcctacgctgctcaacatgatcctgtcgcacccggattcggccgcggtcgatctgagcggcatgaagattatcgtgggcgggtcggcgctgccccgcggcctggcgcaggccgccatcgaccgcggcatcgacgtgttcaccggctacggcatgtcggagacctgccccatcctcacactggcgcaggtgaagacctcgctgcttggcaatgccaccaccgaactcgacgtccgcaccaagacaggcttgccggttccgctggtcgacctgcgcatcgtcgatgacgagatgcgcgacattgcgcacgatggcaaggccagcggcgaaatcgtggtccgcgcgccatggctcacgcaaggctatttcggcaatgcggcggagtccgagcacctgtgggccggtggctacctccataccaacgacattggctcgatcgacagcgatggctatttgcaggtcaccgaccgcatcaaggatgtgatcaagagcggtggcgagtgggtgtcgtcactggagctcgaagacctgatttcgcgtcacgccgcggtgagcgaagtggcggttatcggcatcaaggatgcgcggtggggcgaacgcccgctgccgttgatcgtattgcggccgggacagtcggccggagcagaagagatccaggagcatctgcgcgatttcgtccgccgtggcgcgatctcgaagtatgcggtaccggaacgggtgctctttgtcgaggcgatcgaaaagaccagcgtgggcaagatcaacaagcgcctgctccgcgacaagtaccaggccgccccgcccccctcccccaattccggcacccacccatgagccggtagccaatgccggcgtggcaagtgcgttctcactagaaaacccgcttcaggagacaaagcaatgcaagctttcaccacaacagagcgcatcaggcgccatcccaggttcggcgaactggtccgccgacgcgctcgcctctcgcgggccttgctggccctggtcctcgccccctttctcgcgctgatgctcgcggttgcaatgcagccccagcgcctggccgagcggcttcatccggaaacattgttcaaccttggcatcgtccttgccattggaatcatgctgctggggtggggggcgacgtggttctacgtgcgccgggccaacggcgagctggaagcgatggtgcagcagatcctgtcggaggccggacaatgaatctccaggccatttccatgttcctgctcttcgtcgcgctgacgctgggcatcacgtaccgggcctcctcgcgcacccggaccgccaatgacttctttaccgcaggcggcggcatcaccggcatgcagaacggcctggccgtggcgggcgactacatgtcggcggccacgctgctcggcgtggtcagcctggtctatgcgcgcggctttgacggcctgctgtatatcgtcgggttcttcatcggctggccggtcatgctgttcctgatggccgaacgactgcgtaatctcggcaaattcaccttcgtcgacattatttcggaccggctcgatcccgtcagcacgcgctgcattgcagcggccagtagcttggtggtggtgctgctctacctgatcgtgcaaatggtcggcgccggcgagttggtgcagttgttgttcggcatcgactatgtctatgccgtcatcggggtcggcgtgctgatgatgatctatgtgactgttggcggcatgatcgcgacgacatgggtgcagatcgtcaaggcagtgctgctgctgttcggcggctcgttgctgatgctcctggcgctggggcatttcggcttcagccttgaagcgctggctgccagggcaatcgcggtgcaccgcagcggccccgccctgctcgcgccgggcacgctgttcgccgatccggtctcggcgctctcgctgtgtgtggccaccgtgctcgggctgtcgggactcccgcatatcctgatgcgcttctttacggtgccgaatgcgtgcgaagcacgcaagagcgtgctggtagccagcacctgcatcggttacatgttcctcgccatgtttgccatcggacttgcggccatcgtgatcgtcggtaccgatccacgctattttgaaggcggccatgtcggcggaaagctgctcggcggtggcaacatggtcgcgatgcacctggccagcgcgaccggcggcaacctgttcctcgggttcctggcggccgtcgcctttgccacgattctcgccgtggtgtcgggcctgacgctggccggtgcttcggcgatctcgcacgacatctacgccggtgtcctacggcgcggcactaccaccgaggcagccgagatcgccgtcaccaaaaaagccacgctggccatcggcatcgttgcggtgctgctggggattgccttcaaagggcagaacctggcgttcctggtcgcgctggctttcaatgtagcggcctcggcgaatttcccggtgttggtgctgtcgatgtactggcgcggcctgaccagccgcggcgcggtctggggcgtggcgtcgggcctggcgtcgtcggtcgcgctggtggtactttcccctgccgtctggaagaacgtgctggggcacccctcagccatctttccgtacgaccacccggcgctgttcacagtcccgctcgcgttcctggtcacatacctgtgctcgcgcttcgaccggagcgccagggccgaggcagagcgccaggccttcgacgcgcaactggtccgcgcacagaccggccatggggcggcggcaccatccagccactgacccctggcgcatgacccggcgcgggtagcgcgccacacagacgtgcaacccgctgcggtagctccgtgctaggtcgctgcaggcgtcagcgcggcatagaacgccgcgttgtcccagtaagcgcgcatgaattcgatcctgccatccgtgtccatacgaacgataaagacgtgcggcagcgagaaggactggcctcggcttgcgatccctagcacgtcccgagcctgcgtgcccgtgatggtgacctcggcaattgcggtgcgctggtcatcgtcaccatagaccgcagtgacctggttgctcaaatccgggaaaccatccatcagggcgcgccagattgtcctgccggcatcgccggccggcccctcgagcctcatggggacataatcgatacgcgcatcttgcgaaaacatggcgagcatgccgtttatgtcatgctcacggtagcgcgcgaagaacgccttgacgatctcgatttggctcatcacagatctccctggaaatggatcatggggcaggccggcatggcgcccgataggtccgccacgcccgtgcagtcatcatcatctcgcttcgccgagccctgtcaatgcccctccccgaacggggggctgcgccaacgccggcagccgggaatggcctggctgtctccttcctcctaccgaaggcgttcgaaggcatgcgcgatctcctcgatcgcagcgcgtatccgcgcggtgtggcgcaagtccttatgggtcaccagccacacctcatagggcacgtcgcggcaacgctcaggccagagcctgaccaggtcgtcggccttgcccatgtagacaggaatctcgcccacacccaaccccgccttgatggcactgcgcaacatcaggctggaattgacggccgccacgatacgcccgccggaaatgggttcgcccaccaacattggctccctcgacccaagcacataaggctggtacaccaccaggtcatggccggaaaaggccgtaccggcctggggctctccatgcacgcgaaggtagcctggtgaggcgaacagccccatcggccattgggccagacggcgtgcgatcaggtcggggttgtccggcctggccgtgcggatcgcgatatccgtttcccgttttgccaggttcagcatccgggtcgatgcatcaatctgccatacgacctcagggtactttacgtgtagcgcctcaagcgctggcatcagaaaatccatcgccagcgaatcggttgtggtgatcctcacttcgcccgcgagccggtcgtcgagtccctgcgtcaaccgctggaagtcattggcagactgctccatgcgctccgccgcatcgagcacgctctcgcccgccatggtcagcacatagccgcttgacgtgcgtaggaacagggttgccccaaccacgctttccaatgccgtaaggcgccgccctactgtggcctggtccacgccaagcgatctcgccgcggcgcgcagcgtgccatcccgatacagcgcgagaaaaacccgggcatcgtcccagttcatatcccctctcaaccgcacaaatagtccgatgcgattctgcatgtcagccatgaaaccctgcatcacatcattgaatcgcagaaacctatactgcctcaaccgcgacagcaattcccacgacggagatctgcgccgcgctccacgagttaatcaggaaatttcatgccttcgccttcgcataacatccccgatacgatgacggccatcgaaatcaagcatcccggcggcccggaagtgctggtgcccacacggcggccagtgcccgcgcccggcccgggcgagctgctgatccgccaccatgcggcaggcgtcaatggtcccgacgtattccagcgcaaggggctgtacgatccgcctcccggcgcctccgacatccccggactcgaggtcgcgggcgaagtcgcggccctcggccagggcgtcaccggattcagagtcggcgacctcgtctgcgccctgattccggggggtggatacgccgagtacagtgtcgccagcgagcacaataccttgcacctgcccgatggtctgcggttggtggaagctgccgcgatgccagaaacctttatgaccgtctggctcaatctgttccagcggggcaagttcaccaagggggacaccatcctgatccatggcggcgcgtctgggatcggcaccacagccaccatgctcagcaaggcctttggcgcggccaagatcatcaccaccgtggcctcggacgcgcaacgcgacgccagcctcgcacttggcgccgattacgcggtcaattacctggaagaggattttgtcgaggccgtcatgcgcgtcaccgaaggcaaaggtgccgatgtcattgtcgatatcatcgccggcgattatgtcccgcgcaactacgctgccgcgggcattaacgggcgcatcgtgcagatcggtgtcatcaagggcgtcgccaaggaagtcgacttgttcccgatgttgaccaagcgcctcacccacatgggctcgaccctgcgctcgcgcacgcctgaagaaaaggccgagatcatccgcgagctcgaggcgcaggtctggccgctgatggcatctggcgcggtcaagccgctcatctaccagacattcgcactggaacaggcgcgggcagcccatgaactgatggactccggcacccatatcggcaagatcgtgctcacgatgggccagtaacggcacagggcggcaagtacaggggtgcgagcgatgccgtgcgccccggccgtttcggtatgcctgccccatttgcacgcattccaaaccgaggtgcccgttaacgctgcgatgaaggtggacggcggaacacagtggcgacggtcgctaccatcgacaacaggatcagcgcaccgccaaaccagtgggttacccgtcaacggtgcctgcccagccgtgacatcgcgggcgagggtcggaccctagggaaagacagaaaccattcatcgagtagaccgcgactttgatcggcgacgagaggatcagcgcggacctcgcctgcgaagggacacggatagtcggacgcagagaacctagagcgccgacgcggcgtgcaatggtctgcggcaagcgcagtgccaggataccttgcagcagcgcatcgcgagcagcaacagaaatgcgccgagcgtagagggaaaggcagatactggaccagcacgccgctgaccagcgcgcccattgcgagacacagccccggcgccagcccgttgatcatcacgcagcgaacggtgtccaggtcgagcagcccggcgccgagcacgcttgaggccacgccggtggaaacgccccggatgatgcgtgcgagcatcagcgtggcgacaccattagcgataaggaacggtaggatcgcagcgccatcgcggtgagaatgactggacgccggcgacatagtcggacagcgccccggtggtcaggaacaacatggggcgtgttgatgggttcgcgatcggatagcgcccgcgggaacctagcttcgcgccacgggacgctccgcgacccgtggcaggtcccggcccaggccactgcggaccgcctggatgcgggagttcactttcagcttctcaaaaatattcttcagatgccatttcacggtttccggggcgacacgaatggcccgggcaatctccttgttggaaagtcctcgtgccacgtagtcgagaatttccacttcacgggcgcttagcctgctggcggccaccggctccgcctggtcatccgcggcgtctggctcgcttgccggcgcatcgaacccggcgcatagcctcctcacataccaaggttcaacctcggccaggcggtcttgctgcagacacagcgcgtcaaggatttcccgggccgcagggccggcatcgagaaacacccgctgcagaccgttcgcctggccataggtgagcgcggcgcgcatggcctgcacagcctccgcacgctgccccgcactgtgcagggcgaccgccagcatcactgaaatctgggcggacaggtactgcatgcccgccgcacggacctcagcctgcaccccctgcaggatgggaacagctagcgcgggtcggccgcgccccactagcagccggcaatgcgccacctggaagcgttgccaggtttccaggtagctgccacgcaaggtcgccggtttctgcccgaccagcccatccaggtcgtgcccgatgcgcgcggcacggccgatatctccggcaccaatactgatccggatcgcctcggccttgcacgcgacctgcatgcgcagccattggcggcttctggctacggcttccgcgtcttccacgatccgataggcttcatcctgcttccccgccagcagccgcagacgggccagcgtcacgcagaagccgatcaggggtcccagcgagcaagattgcagcgccatctcgagccgctcgtccagcagttccgcgaccctgtcgaggtcattccattcatagtggattgcggccagatatccgaccgggagcaccgatgcggcagactgccggccggcgcgcgcgttggattcgcgcagcacatcctccagggtctgaacggcctcgcccagcctgccttccacgaacaagctgagcccaaccatgctttgccggtacaccttggcgtagatcggcgtatcagcgccggtattgagggtgagcgtgcgccgcaggcgttcgacctcgtcaaatcccgctgcatagctgagcccgaagatctgtgtggtcagcccgatgccctcctcccatgagccggtgtcggggccgagcgcaagcaccttgcggcccatttccaatgaaagttcgctttcatcggacagacccgcgattagcgccgtgaccgcctgcaactcgacgcgcactacctcggtcaagggcagccgcccgtggccaatgtcatcctcgaccgcctgcaacaccgctttggccgccactgtctgcatcgtcaacgcgagcgcccaagcctgcgccaggcgcaggcgcagccggccatgcaccgcctcggggggcagcttggcaacccagctcagcaccgtccgcacgtcgctggcctcgaccagggtcatcgcgcattgctcgacccagccggcggcgcgatcgacatcccccgcggccaaggcatgccggaccgcttcctgccacagcgattgcgccgcaaaccattcactggcccggcgatgcaattcggcaacttcgtggggacgctccctcaccaggcgttttctcagatattcggcaaacagcgcgtgatagcgataccactggccctcggcgtccaagggtctgacgaacaaattccgagccatcagccactcgaaagtggcatgcgactcgctggagcctgtcactgcatcgcacaagggcaccgacatccggtccagcaccgaggtctgtaggagaaaagtctgtagcggctcggggacgtgaacaaatacgttctcgttcagatacgcttcaacgctgcgccgggcgaatggcaagcgctcagcaaagacgtcaggcttgtcggttgcgcttaatgcaaacgtcgctaattgcaagccagccgcccagccttctgtcgctcgcagcagcacctcgatctgggcagcgctcagggcatggccggaaacggcagaaaaaaacgcctgcgcctcggcgctgtcaaagcgcagggcctccgcatccagcttcagcaattggccccgggcctcgaagtaactcagcggaaagcccggctcgccccgccccgcgacgagcagatgcaggttctccggcgcatatcggagcagcctgaacaccgcctcgtgaatggctggcgatgccagccggtcaaaatcatccagcaccaacaccatttggcgcggcagggccaagaccgcattgagaagttccgcaaacatcgtgtccgccggcgctagcgggtcgggcttcaggccgcaagggatcggctcgccggcctgcgtgcaagcttcccttgccgcggcgagcagataagcgccgaactggaagaggtcatcatcatcgcggtcgatgctgagccagccaacggcgcagccttcctgcgccaagaccttcttccattcactcaacagcgacgtcttgccgaagccggcgggggctaccaggaccgtcagcttgcgctccatgccaggccgcaatagcccaatggagcgttcacgatggatatagtggcgcgttcgcggtggcgccagctttgtcaggatcaaggctggccgccattggggcagttgcgcagcagcgaccggagatgattgcgtcattcgtgactcttcctgacagcatgcagcacactagacgatcacatcccattcatcacgctgctcccggcgcaccatctcagcggcggaatcaggcttgatggttcggtagcgatgcgacgcggcggtgatgacatcgatcatggcatcaatcatttcctgcgggtcatgttggttattcagcggacgcttcatgcgtggccgcatcgcttgctttccgtcttcccaccattggtccatgctttccatgccggtgtcgttgaaacccgtccggtaggcgccaggattcacggtcgcgacttgtatcccgtaaggcttcagctcctcacgcatggacgcgcacagcgcctcgaccgcatgcttggatgccgcatacgccgccacccaggggaccttgaccagaccggcaacagaagacgtccagacgatcttgccgctgccgcgccggatcatctgtcgggcgaacccctgcgccatctcgagtgccgcgaatacattggtctcgaatacccgccgcaccagcgcgataggaatctccgccaccggccccgcctccatgatgccagcattgttaaacagcacgtcgatctcgtgctggaacgcgcgctgccggtcgatcgcgtccaacatgtcgagtttgattaccgtcagccggacgccctcgagctccgccgcattgcgcaattccgtcacctgcggccagatttgcgctcctgcaataacgttatgcccgctgcgcgcgagtcccagcgccacccctttgccaaagccgctgccggcgccagtcaccaatacagtcttccccatactacgctcctgagtcgcagactaggcgggggtgtgcccttactgctccagctttgccagcagcaggttcgcccaccgcaacaccggacgccgagtacgccgacgcctttcaccgcccacctccgccatggtcggtaccttggtgtacccggcgctactacaagcattgctatccgcagtcgccggaatgccaactagctacccctcgcgcttcttgcccctcgcgtctaacttttcttcactaggatcacccgagcagggctggatacgactgtaacggatgatcgcggaaacggaaatcaagccacaagggcataggataccgtcataggggggggaggtggggggcatgaccggcgctgccaactcttcactgtttccgggcgttgctttgtgctgaaccgaagcctcctggactaatccgagcgccgacttcagcattgccaagacctgacctgggtacccccccacttagggaggctccttgcaaacaccgcagcgatacgggaatgattgcgttaacgatgcgaacagcgtgtctcgcgtttccacgaacaattactcgctaatgggaatcgcaaggccattggattggagtgtgcatcctaaagcacttcgaaagaatgtcatgcgattcgtcgtcggcgcaccaagcaaaatcatgttcctcgacttgaactgtaatggtggtggagcggagtcaaccgaaggcgtactcacgccattcgggatgctgaccttcgatcgccgccgcgtcaattccgaaattgctgacatagccaccttcctccgcggcgcctgggggaaaccgcgacgccccggtggagggcaaccgcatcactcgacccgccgcgaactacgggccaagcctggctcggcaagcggtagatgaatccaaggacctgccatgtcgactatctccaggcgttcatttgtccagtccgtcggcgctgcaacactcgcgccgggaatgttgctcgtctcggccgaaactggggccgcgtccgaaagctccgcttcgccccaaggggccagcgcaaactacgccgattacaaacatatccaggtcaccaaagaccacggcgtcgccaccgtaacattgaactatgcgccgctcaacctgctcgatgaggtactgtcggatgagttcgatcgggtgacccgacaactggaacaggatgcgagcgtacgcgtcatcatcctgcagagcgctgtgccgaaattctttatcgcacactcgggcctgcaccgtgtcggctcggcgccgaagacgacttcgaatacacgcacattccgtctgacccagatgctcggagagcgcctgcgcaacatgccaaaagccgtgatcgcaaaggtcgaaggcatcgctcgtggtggtggctgcgagatcgcgctggccgcggacatgtgtttcgccgcgatcggcaaggctgtgttcggccagccggaagtcgtctgcggactcgtccccggcgggggcaacacacagcgcctgccgcggcgcatggggcgcgcacgtgcccttgaggtgctgctcgtcggcggagacttctcggcagaactggccgaccactacggttatatcaatcgagcgctgccggcaggagaactggggcaattcgtggacaagctcgcccgccgcattgcaaccttccccaccaccacgattgcccatctgaaaaaggccgtggacatggggtcggacgtatcgttctccgaagggttgttgatggaagcgcatgaggccgacctttgcgtagccaacgaagcgatacaggcgcgggtcaaggcgatactcaaagctggcgctgagacctacgaaggcgaactccattttcctgaactgtccgcgaagctgccgcccgccgattaagcgatcgacctgcgtccgaaccgtggttgcccgcaagtgcgaaaaaaacattgatacgagcgggaaggtgaagtgcacatagcaaggcgccggaatgcatggtccttgctggtgatcgggggaattccccatttgatgtaaaaaaagccggtgaaaactaagctctagaactgatttttagaaggaagcctatcatgacgtcccagaccgacagcaagcagccgacgcctgacccagccgagcacaaggcgttctttccctccccatactcgctctcacaattcacatcgccaaagtcgaacctctccgacgccgactatccggacgcttatcggggaggtcgctggaaagtactactcgtcgctgcggacgagcgctatctcctgaccggaaacggtaccttcttttctactggcaaccatcccgtcgagaccctgctgccgatgtatcacctggaccgcgcgggcttcgagttcgacattgccactttatcgggcaatccgaccaagttcgaatggtgggcgttcccttctgaggacgccgagataaagtccctctacgcgaagtacgagcaaaaatttcaacagccccttaagcttgctgacgtagtcaattcgttggacaaggacgcaaactacattgccgtttttatccctgggggacatggcgccctgatggggctgcccttcagcgcagatatgaaggcaacccttcagtgggccatgcaaaacgacaggttcatcatcacgctgtgtcatgggcctgcggccctgctttccgccggcgtcgacgaacctaacgggggagacctgttccgcggctaccgcatctgcgcattcccggattccatggacaagcagacgccagatattggctatatgcccggcccattgcgttggttctttggagagaaactcgcagcgatgggagtagagatcgtcaatactaaaattgatgggagtactttccgtgaccggaagctcctcacaggcgatagtccattcgctggcaacaatcttggcaaactggctgcgcgcgcgttactggaagaagtgcagagtacgggtgcgcgctagtcctcacaccatcatggacttcgtctgctcgggcgcatgattaaattgcctgcgcaaaccgtgataacgcctctggcggcgagagaccattctccggtccctcgtcgcgaggcgttcctcgctctttcttcgtgaggacaacgcttgatcccgtccgttaatttgaggcaccgctgcaaacaagagcattctggatggccgttccagatcgcttaccggtcttaattgcaaggtagtctggatgactgagatgggttgcggatagaaaggtggcctggcctctcagccaccgaagaaacaggaatcatttgccgactcaaggtgcatcagcgtcccctatcggtccctataggtgcaagacgatgtgccgcatcctcccgtggaggcccaacctggctcgctggatgaaagctagcttttcagcccctatcggcgaatcactcccgatatatcaactagtgcaggcggctggtcgttctcgaagttccgtcgtgagaataattttcgactgaatgagactccacacacaaatcgcatctaccaatgcacggccaaagatcggaaagccattttgttctaacgagcgatacactctagccacactgtccaatcgtgcatttcattgtgtttataatcggccgtcgtcacccagtgccgactactgcgctaatgggacaagcgcagacccttttgggcaccccatgtctagtcggaatgatgtacacggttatcgtggcgttgtacgagacccagaacaggcgtccgttgcaagactgacctggtgtgtatgcatttaagttggagcactcgcgacccctgaccctatgtctacgccccgccactagtgaccgatgccgaaacgcgcccttccggtgcgtaaataaactatcctctgggcataggtatggatgttcctgtcgatacgaaggagcagcaacgagtactacagcgaatccctcgaatcggtgttcaggattccatggcaggccatcgacaacgcgttccgcccgagcggcagtcctccgccctgaagagggtcagcacccgagccatcgcaccgcgggcgaaatggcaaaggcggccagccgacgggccgcctttggccgcttcggcctttcctcgttacatgtcggcatcaggagacacccatgctggagacgatgctgaatcagttccctccgctggagcaggaagctttccgcgagacctgtctgcgtaacggggtcgcacccgacggatttaccgtaacagcggttgaagacgctgcaggcgctgggccgccacgcaggcgcaccgtctcggtaggcttcgggagggaaatccgccaatacaacggaaacctgggtgcgcaatggactgtcgatttcgaggacgacctgcgatcgcgtgtgttcggctgagctttgcctctctgcgccaccgttttcatacctcgagcaccggagcaaatcatggcggactgatggcaggcatcagcctcgaagccactaaggtcacgaagctggctgccatgtaaccaccaacagccgcccccaggagcgcccgacagatcaaccccaatcacacaggcccatcatggacttcattaccagcgccggcccgctaatctcgttgatcgccggcatccttattcttgtcattccgcggctgcttaactatatcgtcgccatttacctcattgtcatcggcctgctcggactgtttggcgggcacctgcgctgagcggtccggggcctgcgtctggtcgggagcttgccgggtgtgcggacgcctccctcaccatcttccggcatgaaagcaaaagccccgcgcggatagctccggcggggcctgggcgaatatggttgcgggggcaggacttgaacctgcgaccttcgggttatgagcccgacgagctgccaactgctccaccccgcggggcgaaatatacgcgggttggcagcacttggatacccctattccaaaaaactgtgcagattgccgagcaggtcttctcggggcgaccgcttttgacactgtcatgaacgggccgccacgaacgcgtcagccgccctgcccgcgctaccggagcgtccacccgatccgggcaagaccggcggcgcggcgctgccatcgaaccattcgccattctttgcgccggcgcctgagcccgcgatcaaggccggggtcggcgcaatgagccaggccgtcttgtcggcgctggcgcaacggaaggcagccaatcaggcgtgatcgctctggcgcgccgggatcttgcgtgtcacggcttcgtcgaaccaacggtccatcatcgctttctcgtagcgcagcctgtcggtgggactgtagacgttgacacccatattgaaggtctggtcggcgatacgctgctcgcccctgccgatcacggctccatcgctgccgcgtagttcatagagcagcttcatgtgcggccaggtgacatcgcgcaccacgcgcaagtcatagccgggaaaacgccacggttcgaaatgtccggccaggtcgacatcgagcacttcgatgttcagcgtatagccaggcggcaggtggcgggcggccagttcgtggaagtgggcgcggatatcgttcatcacctgcgccctctccttgtcgctgccgtacgcgctgcgataggcggcatccgtgtatgtctcgggatgattgaagctaaggatcagggttccggccggcggcgcagcaagagcgctcaaagcgagggctgccgcgcaggcagccagcagacggagggatctggccatggcaagctccagaacggtagtacgctccttgattctagaccgccccgatcgcttcggaccatctggctgagtgcaggctgaaccacccccaattttgctgctgcgcccctgaagctttgctccctcgcgatgcttgcgaaggcagcaagctcatccgggtatccgggtgccatcgaacccgggaatgtgcagatcagagttaaacggctcgcagttgcactttggccgcggtcttctacgctgcatccattgcaagggccgccttcacgtgcgtctccgcgcaggagccaagaacaaaagcattacaccgggagcgcctgtcatgatttcaggcacggcagcgagcgagggttcaggcaaccaggggactcagggtcaggctgcgccgtcgatctcgctgcccaggggcggcggcgcgatccgcggtctcggcgagaagttcggggccaacccggtcaccggcaccgcctcgatttcggtgccgatcgcaacaagcccgggccgttcgggctttggcccccagctttctctgagctacgattcaggcgcgggcaacggtccgttcggcttcggctggaacctgtcgcttcctgcgatcactcgcaagaccgatcgggggcttccgacctacctcgaccatgtggacgcacccgacgtctacatgatctctggcaccgaggacctggtcccggtgctcacgaatgcgcaagggaaatgggagcgggagcagttgcccgcgcgcaccgtcaatggaatgacgtaccgggtagaccgtttccggccgcgcatcgagggcttgttcgcccgcattgagcgctggaccaacctcgccgatgcgagcgacgtgttctggcgctccatttcaaagagcaacgtcactacctggtacggcaggacagccgaaagccgcattgccgatccagcggacccaagccgcgtcttcagctggttgatctgccagagccacgatgacaagggcaacgtcattgtctatggctacaagcccgaggactcggcgcggatttttgaggacacggccggcaacggacttgccagggcacatgagcgcaaccgcacggatgcgtcccgttccgcgcagcgctacctcaagcgcattcgttatggccatcgttcgccctacttcccgatactgacggacgatgccccctggcccgagccctctgattcgtgcgcgcgcgacgcaagcaacgcctggctcttcgaggtcgtcttcgactacggcgagcacgacgccagcgcgccgacgccggccgaaacgggcacgtggcccgcgcgccaggatccattttccgcataccgcgccggcttcgagttgcgcacctaccggatctgccggcgtgtcctgatgttccaccacttcccgggcgaagcgggtgtagagcgcgattgcctggtgcgctccaccgacttcagttattcggacggcgcccccactgacgttcacaaccccatctacgcgttcctgcgcgcggtcacccagaccggctatcgtcggcacaacggcggctacgaccggcgcagctttccgccgttggagttcgagtacaccgcgccggaggtgcaggatgtggtggaggaagtggacccggagagcctggagagcgcgcccatcggcctggacggcagcagctaccgctggaccgacctgcacggcgaggggcttgccggcatcctcaccgagcaggctggggcctggtactacaagcgcaatctcagcccgataccggaaaggctgccgggcggccagcaggaagtgagggcgaaattcgcgccgctcgaagccgtcgccatgaagcccggtgccagcttgtccggcggcgcggagttcatggacctcgccggcgacggccagcccgacgtggttgtcatggaaggcgccgcctccggcctgtacgagcatgacgaggccgaaggctggcaacccttccgtcctttcgcctcgggcctgaaccgcaatctgcgcgatccgaacctcaggttcgtggacctggacggcgacggccgtgccgacgtgttgatcaccgaagacaatgcctttgtctggcatgccttgctcggggaagatggcttcggcccggcccggcacgtcgcgcaggcgctcgatgaagagcaaggcccgcgcgtcatctttgccgatggcacccagttgctctacctggccgatctctcgggcgatggcctgaccgacatcgtccgcatccgcaacggggaagtctgctactggccgaacctgggctatggccgcttcggcgccaagatcacgatggacaacgcgccctggttcgaccatccgggccagttcgaccatcgctatctccgcctggccgacattgacggcagcggcaccaccgacatcatctacctgcaccgcgatggcgtgcggctgtacttcaaccagtccggcaacggctggagccagccacacgtgctgaaggtgttcccgcgcatcgatgacctggcaagcatactggccaccgacctgctcggcaacggcacggcctgcctggtctggtcatcggcgctgccgggcgacgcgcggcgttcgatgcgctacgtcaacctcatgggcgggcacaagccgcatctgctggtcaggaccgtcaacaacctcggggcagagacccgcgtcgactacgccccctccaccaggttctacctgcaggacaagcgcgacggaaagccgtggatcacccggctgccgtttccggtccacgtggtcgagcgcgtggaaacctgcgaccatatcagccgcaaccgcttcgtcacccgctacgcctaccaccacggctatttcgacggcgaggaacgagagttccgcggcttcgggatggtcgagcaatgggacacggagcagttcgccgccctcgccggtggcactgtcccggcagacaacatcgccgccgcatcgcacgtgccgcccgtgcacaccaagagctggttccataccggcgtctacctcggtcgggaacgcgtctcgcgccacttcgagaatgagtatttccgtgagcccggactgaccgtcgaaaccgcgcggccgcttctgctcgatgacaccatcgtcccgcctggcctgaccctggaagaagagcgcgaagcctgccgcaccctcaagggctcgatgctgcgccaggaggtctatgccgatgacgccgatcaccccggcgccacgccggatcaggtccagcgtgcccgtacgccctacaccgtcaccgagcagaacttcagcatccgcgccttgcagccccgtggcgccaatcgccacgccgtcttcttcacccacccctgcgagtccctcagctaccactacgagcgcaacccagccgacccgcgcatccagcacgcgctgacgctggaggtcgatgactacggcaacgtgctcaagcaagcggctatcggctacggacgccgcgcttcaccgctgtcgacgcagtgggatcgcgaacggcagacaacatcgctgctcacctacaccgaaagccgtgtcaccaatgccattgagtcatccgacacgcgccgtaacccactgccttgcgaggcgatcacgttcgagctgacgggctacgccgccactggtgcggacggtcgctaccaagccacggacttcgtcgagcccgatcctgccgctgccggccggctacgccacaaggtcaccgcaccagatgtcgcttacgaggccacagccgccggcagccagcgccgccgcccgatcgaatggctgcgcaccctctaccggcgcgacaatctaaacggcctcttgccgctcggagaatcgcagtcgtttggcctgcccggcgaaagctacaagctcgccttcaccccgggcctgatcgaacaggcctttcagcgtccgcgccaagggcaggcggccgaacccctgctgcccgatccggcggccgtccttggcggacaggccggcaaccggggcggttaccttcgaagccagaccctcaagacggacagccgcttccccgcgagcgacgcggacgatcactggtggatgccctcggggcaggccttcttcagcacggatcctgccgacaacgccgccaccgaactggcgcaggcgcggcagcacttctttcggccgcgtcgctaccgcgaccccttcggccagaacgccttcgtcgacttcgacgcccacgacctgctgatggtcgaaacccgcgacgcgctcggcaaccgcgtcacggtggacagcaacgattgccgcgtcctgcagccgcgcctggtcagcgatcccaaccgcaaccagaccgaagtcgcttttgacacgctcggcatggtggtcggcactgccgtgatgggcaagccgctgcccgcacagatggaaggtgacacactggctggttttgtcaccgacctcacgcaagcccagctcgacggctttggtgctgccgatccgcacgccgtcgcagccgcgctgctgaaagacgctaccacgcgcatcgtctacgacctcgaccgcttccgccgcacgcggctggcccaccccaacgacccgacgaagtggcagcccgcctgcgccgcgacgctcgcgcgcgaaacccacgcgagcagcccgctgccgccccagggcctgaagatccagctcagcttctcctactccgacggcttcggccgtgagatccagaagaagatccaggccgagccgggaccgctggatgtcagcaacctagccgcgcccatcgtcaatccacgctgggttggcagcggctgggccatcttcaacaacaaaggcaagccggtccgccagtacgagcccttcttcagcgccacgcatgactacgaattcggcatcatggtcggcgtcagcccggtgctgttctacgacccggccgagcgtgtcatcgcgacgctgcacccgaaccacacctacgagaaggtggtattcgacccctggcagcagaccacctacgacgtcaacgacacctgtgccgcgcgcaacgcccagaccggtgaccctcgcaccgacgctgatatccgcggctacgtcgccgagttcttcaaggccccgccagccaatcccgcgcagccttggcaaacctggtatgtacaacgcattggcggcgccctgggagcggacgagcgtaacgctgcccaacgggctgcagcacatgccgacacgcccaccaccgcgcatttcgatgtgctcggccgcccctttctcaccgtggcgcgcaaccgcgtcgtgtgcctcggtcacgacctcgacggcggcgaggacagcttcgccacccgcgtcgagctggatatcgaaggcaaccagcgcgccatgcgcgacgccatccggcaggcgggcgacccgctcggtcgcatcgtcatgcgctacgcctacgacatgcttggcaaccgcatccaccagctcagcatggaagccggcgcgctctggatgctcaacgaggtgggcggcaaacccatccgagcctgggacagccgcggccacaacttcaccactgcctacgacttgctgcgccgccccgtcgagcagaccgtgcgcggcacgaccaacgagtccgatccgcgcaccctgaatcgcgagatcctggtcgacaagatcgagtacggggagacactgggcaacgccgaagtgctcaacttgcgcacccgcatttatcgccacttcgattcggcccacgtcgcgaccaatgcgcgagtggatgccaacagcaatccgaccgatgcgtacgacttcaagggcaatttgctgtacagcacgcggcaactggtcagcgactacaccgccatccccgactggctgcgcgacccgaagctcgacgtcgaaaccttcgaggccggcacctgttacgacgcactcaaccgtcccacccagtccatcgcgccgcgcagcagcttggggcgcggcaagttcaacgtcatccagccggtgttcaacgaggccaacctgctggagcgggtggacgtgtggctggaacgcgctgccgaacctgctgcactactcgacccggccaacgaggccccatcgctggtcggcgtcgccgacatcgactacgacgcaaagggccagcgcctgctcatcgactacaagaacggcgccagcaccttctaccgctacgacccgctcaccttccgcctcacccaactgctgaccaagcgcaaggcggcggacttccctggcgacgatccgcagcagcccggtgccggctggccgggcaagcaggtgcagaacctgcactacacctacgacccggccggcaacatcacccacatccaggacgacgcgcagcagaccatctacttccggaacaagcgcgtcgaaccgagcaacgactacgtctacgacgccctctaccgcctgatccaggccaccggccgcgaacacctcggtcaattggcaagcggcgagcgaaagccgccaacggcacccgatggatccaacgccttccacacaggactcgaccaccccggcaacggcaacgccatgggcacgtacatcgagcgctatgtgtacgacgccgtcggcaacttcctgcaaatgcagcatcgcggcaacgacccggcgcatccgggctggacacgcgcctacgactatctcgaagccagtctgatcgaagacggcaacggcggtgcgctgctcaagaccaggaaccgcctgacccgtaccacgttgaacccggcgggtaacacgccgcagccggaaacctacctgcacgacgttcacggcaacatgctgcgcatgccgcacctgggcggcggcctgctcgggcccaacatgcactgggactacaaggatcagttgcgccagaccgacctgggcggtggcggcgcggcttggtacgtctacgacgcctcaggccagcgcgtgcgcaaggtgtgggagaaagcgccgggccttaccgaagagcgcatctacctcggcggcttcgagatcttccgcaagcacgtcggccccattgacgccaacaccgccaccctggagcgcgagacgctgcacgtgatggacgacaagcagcgcattgcggtggtggagacgcggacgtttgactcggcgggcggcgaccacgcaccccggcaactgatccgctaccagttcggcaaccacctcggctcagccagcctggaactggatgaacaggcgcagatcatttcctacgaggaatacgcaccctacggtagttcgacctatcaggccgtacgcagccagaccgagacagcgaaacggtatcggtataccggcaaggagcaggatgaggagagcgggttgtactaccacggggcgaggtattacgcgccgtggctcgggcgatggacggcctgcgatccggcaggcgaggaggagggtcccaacctctaccaatactgcttcggcaatccgacgggcttcgtcgatcctgacggccagagcggcaaaaagctcgccattgtcatgcacaatgaatccaagccggcgggaaaggaactcccccgacctaaggagcccataaagccccagaagccgacgatcaaagcccccggaaaaaatgcttcagataaagagaaggcgaaatacgaaaaagataagaacaaagctgagaaagcatttgtggaaagcatgaaaaagtatgaagaagcaaaaaagaaatattcttctgatttgaaaaaatacgaagcaaataaaaagttgtggagtgcttatcgtcagtctcaaaacgagtataaggcgtctgaggccgcgttgaaagccgaaggctatgatgtcgtgcaagtcgattccggcaaagcgttactcgatgcactcaagaacgccgggtcgatcaaggaactcgtggtcctatcgcatggcacaccctttggactgggcggtgaaggacctggcgccggcctatacaccgacaagccgccgggcggtgccacgttcgacgccaagcgtgcggccaaactttcagacttggagaaaatgatcaatgacaagaagatcgcgttcgaaaaggacgcgaccattgtcttgggaatgtgcagaaccgctggcggcaaagaaggtacgcatgtcggttcgtccacatggaccggaccgattgaggataccttcgcttatcggctagcaaaaattactggccttgaagttttcggcagcgaaggtgtttcatcatacggcgacgacaagcgaacatcgacgccattgcgccgtagcgacattggctggcatcgattcacgcaacagaacaacaccataaaaacggagagcttgaaaggaaaatatttgaatgtcgtgactcgcaaaacgagcgagaagccgtaatgaaattccgactattgctcgcatcctaatctatacagatttgtgaacggaaatgtatgaaaccagttcctcgcgagttctttatcggcccgatggactttttctccatcctgctgccgggcgcgctgctcacctggctgcccgagggggcaggcatcggcataggaccgggcaagactttcattggttctgaaccgggcaacatccccaaggcaggcctcgttgatccgtttgctggaccatcaaacgaactgccggactttagtctgggtccggcgatagcggtctggcctccccctccaagcccactacatcaactcagggcccttgctgagcgccttgctgtgcctctggtcgaccgcgcttggcaaatgctgtggggctccgggccccaaacgaatacggcttcgccgtgacgttctgcggaacacgcggatcggtgaagtgttatagggggaatgcgtcatgccacaagtcatcctcgtccgcctcgtgccaatgaagccgaccagcggcgccagtttcacgagctatctcaacaacctgacgatccgtgcgttcgacctgtcgttcggcaactccaccgatggcacgctggtcgggcaggcacagggcgcctggatcccgaatgcgggcatcaatgcggttggcccggcattcaatcccgccaaccagcggatcgtgcagcacttctccgtatatccggtgcaggtgaacccattgcccgcgccgccattcccggacgtacgccttgaagcggtggcgacggcgatcatcgagctgaccccgcccgcggcggagttcaacacgaccgatctgcgcctcgagatcaggcagggcacgcaactcgttgcctacgagcggctcgacttcaacgtgaaggtcgagccgaacgcaccgctctcgaacaatccgctgacctacatcggcgtcgatccccccgcggtcgtgctgacgctgccggaccccgcggtcgcgctcgatccgaatgccgccttcgttgagctgccgcccgacggcacgccgcccaagttcgtgccgctgcgcaatgcgatcaacaaggtgctggcgcaggacccgggcggcggcgccacgctcgccaaccggagcccgctgaccgcggcgcagtcgcgccaggtctcgcgcgagatcatctggaaccgccagatcgcgcctccgcctgagcggccgaacaaccgccggctcgaggacatgtatacgcgcccgccgaccgacacgtcgtggagcgccgacgagcgcgacaaggcggacatggaccggaagcagtatgaagccagcctgctcgggtattacgcactacagaacgccaacgcggatcgcctggcgcagtacgtcttcgccgcgtcagccgcggtgtggtccggacagcagagcgcgaaccccggacgcgttggcctgcgcttcccggtggaacccggccctccgccggccccgggcgcaacgttccgtcgggcagacgtcgtgatcgtgaacgatggcgggctggtcctggatttccaggttcctgccgaatacttctatgcgctctcggcggtcctggcgacgaacgtcaccgcccaggagcgctaccggatggccaccgacgatgacgaatcgcgcatcgttgcgtccatcaaggccgcgctggacgccaatatcatcgccgccccggccacgacgcccgaaaacgcggcgcgccggctcgccgcaatcggccggggccgcgtgcagcgcgccccgctctgtccgctcaacgccaacgtgaacgcgctggtcacggcatggctggcccagatggtgccgtcgatcgacccgttctggcaacagagcccgttcccggccgcgctggtacccgggcacctcgacctggtactcgccgtcatcacgcagcagactgcggtcacgccggcatcggccgcgctgatcgccgcgatcaagggcatcccggtcgccaacgtggcccagctcaaggcacgcacggtccagcagtggcacgccttcttcctccccgccaacgttggcctgcttccggacttcaccaaccctggcacgcccgcggagcgggtcgaggcgttcatccgccagttgcggaagtattttgaagtgctgtcgatcgcgccggcgccgtctgtgggcgcgatcgcaaacgcgcagtcgattccgctcgccgccggcgatcccttcgctgcgttcctcgcggccgcccccggctttgcatttccggtggcgaactggggcgcgcccgccatcgtgaacgcgctgcaggccgtgttccccagcgatgcggccgcgcaggcgtggctgcttgacgcgctcaagaccatcgacgagctgctgcgcgcgaccaccggtgtcgggccggcggcgctgcagttctccttgctcgaagcgctctacgcgcgcggattcacctcgcgggcgcaaatccaggcgctgtcggccgccgagttcgagtacgcgctgacgggaacggtggcctatccatttgccgcggcaatccaggccgcggccggcggcgcgacgggcgctgcaccgccggcgcttcccggtccgttcacgccagtcaatccggacggatcgctcatcaactgcatcccgccatggcacctgtcgccgctcgggccggtgacgtatctgcaggatctgctcgcgaccggcatcggcgccacatgcgagcatccggcggcaaccggcgccacgctcgccgacctggtcgcgccgcgccgtggtgcgctcggcagccttcacgccaccgccgcaaacgtccacaccacgctgccgctgatcgatatcgtcaatgagaacctcgaggacctcgccgacaacggcgctcctggcgtcgtctatgacaccagcgccacgacgctgggcgggcacgcgctaagacccgccgacgcggacgacggcaccgggcacgcgccgaataccctgttcgccgcgctgccggagcattcgacgccggcaacgccagtgaagaagcccggcgcctatgtgaagctcgccggcgatttttcctcgccgctgctgccctactcgcagccgctcgacatttcgcgcacgtacctgtgcggcatgggaacgtcgcggttcgcgaccatgcgcgcgttccgcgaagagatcaccgagttcgcgatcgacgcgaagcaggaggcggcggacttccagaagcatctgtggcggtatccggtgcggatcgagctggcaatcgagtacctgcgcctgtccccggacgagtaccagacgctgtacgtcgatccaatcggcccggccgacctgctcaagatgtacggcttcccgtcggccacgatcaacggggtcgactggaagtcgatcgtcgtgcatgtgccggagttcctcaggcgcacagggctggattactgcgagttcctcgagctttggaaagccaggtttgtcgagtttgaacggcaaccggccgcgtcagggaccgctgccgggcggaccacgggcgccacggggacgacgccgaatgccggattcccggattgcgaaccgtgctgcccggaagatctcgtcatccagttcgtcaatccgcaggcgcctgaagatgcgctgcggcggctgatcgtcttcatccgcctgtggcgatcgctcaggtgcctgcccggcgcgggctacagctttgcggatctgcgcgacatcagtctggtgctcggcctgttccagggtgcgaacgtcaacccggtgttcatccgccagctggccgccttccagatcctgcgagacgactggcggctcgcgctgggcaccgacccggacgcggcaccggacgcaaccggatcggctcgcacacgcctgcttggcctgtgggccgccgcgcccgccgcgtcgttcgactgggccgtggaccatctgctcgggcgtatcgaggaccgcgccgagcgcgagcacgcgcccggccggcgtccgggcagccaccgccgccatcgtccgcccgagttcatcaagatcctgcgcgacaacctcgacacgctgtcgctgctgagcggcttcgatccggtcgcgaggccgtggaatgcacaaccgtcgggcaccctgcgcttcacggaaatcctggccaaggtctatggctcgtggttcaccaccggcgagctgctgtacctgttctcggtcgaccagcatctcgacggcgacgatcccttctgccagcaggacaagaacgaagcgctcgatcagccgttcgacttcccggaggaagggcatccgcacgacctgtggtgcctgcggcgcaagctgctggacgtccacgcaacggaagaggaaatcgccgcgctgacctggaccgctctcgtcaccgcgatgcggaccgacttcgggtacgagcctgcgccgggcaccgatccgctgcgcgagcttggggagcatttcttcccaggaatgcttgctgacgcgggatttccggtcagtccgcaggcgcgccagtatcgctcagccctcggggccaccgtcgcgagcatgtggaaccacccgcatcccggaccgttccagtacgatgccgtcgccaaggaattggcgacgtccctgccgctcctcgaccaggacgtgctgttcaagctcaatgcgatcgaacagttgacggacgccgagcgcaaggcggtgcagcaattgtacttcgccccgcgtgccgagctcgcgcggttctcgttcctgttccccagcctcgccgccgctgaacaagcgctggtccaggaagcggatgagacccggcgctgggaatacttccgctgcgcgttcgtggagttctcacgccgcgcgcacatcgtcgcggagcaccttgccgcacatgtgggctacgcctccgacggcaccgacgcggaagccgatctggcgtggctgatcctccgccgcctgctcggcgacgagaacaaggcagcgttggcgtgggagcaggataacggcaagccgcccgccagcttctcatggccgttgccagcgggcggtgcctttgccgccctgaccggccttaccggcaccggactgctcggcgaggtgaaaggcgcgagcgggagttcatggcccgaactgcgcggaccgatgacggcgttctcgcaggcgggcaacgcctggaatgcgccgcttcccggggtcgtgccggacctggatttcacgctgccgccggcggcactgaagttcgccgtattgcgcaacggcctggcgatccgcgagtcagacgggcagccgctggcgggcgccgaaggctacaccgcacgctggaccggcgtgctcatcgtcgagacatcgggcacgtacacattcttcgccggcgcaccggcaccggactgcgatgcgcccgatttcgaggcgtgcagccacaacaaatggcgcgtcaatctgcggcgcggccagaagacgttccgactgctgaactacggttgggcggacgagccggcggcggaccgtgcgtccggcccgctgcatctgaagcgcggcgcctacttcatcgatatcgacttcgaggaatcgccacccgagttcgacgagaagcaggagctggcgcgcgcccgcaccggcttcacggtgaagtaccagggcccggacaccgatgactgcattgcggagctgccggccgagcgcctgtatcgcgatgtctcaccgggtgagctgaccagcgcgcaggcggcggtgccgtcggcaaaggcgtatctggccctgcagtacaccagcagcctgcgcgacatccgccgcacctaccagcgcgcattcaaggcgctgctgttctgccaccggctgcgactgtcggcacgcctggtggcgcgggcaaacgtttccgaggccgagtacatgctctcgtcgccaggcctgtttgccggcttcacctacgttcccggcaccccgtatacatcgcaccgcgcgtatctggacttcaatttcctgccggttggcgacacctacaatggcgatccggagcgcaagccaccggcgccgctcgaccagcgcgcgacgccgtcggtcaagcgccggcaggcgctcttcgactggttcgagcgcgtccatgactacacggtgatgcggcgggcggtccagcaacgggctgagcgcctcgcgtggctctgcttcgtcgaggcgtcgaaccagcagcccgccgatcccgtgccgctgctgatggaccttggcgtcgacatggatcatgccgcgcttgtcctcgaattccacgacggcgtatccgtcgattgggccaggctgtcggacgatcgctgggcaatccgcgtctggcatgccgcgtcgtgggtgaggcggctgctgaaggcgttcgttccgcgcgacctcgcccaggcacagcccgatgcctgggcagcgagcgcgccggcggcaatggccagcggcaacgcgaacctgacaaggttctaccgcgacggcatgatcgagcgcggcaacccgctgcgttacgccgacatcgagcacctcaacaacctgctgcgcgagcggggacgcaccgcgctggtcgcgtatctcaccggaatgaaccgggtcccgcttccgtttgtgccaggcgcgttcgcgacgtcggcgaaggatctcagcgcgttgttgctggtcgacgtcgatgctggcatttgccagaagatcagccgcattgaagaggcggttacggcggtgcagtcgttcgtggaacgcgcacgcctggcgcaggagccgaccttcgtggtgaccccggcgtttgcgtcggcatgggacaggctttttgtgaccttccacatctggcaggcctgccgccgccgcacgctgtaccaggagaactacgtcgagtggaccgagcacgaacgcgcgctccaggccgaagcgttccgcttcctcgaatccgaattgcggcgcgccaccttgaccgcgccgcaacccggcggcatggagtactggcccggaccctactggccggcccatccgtcactgaccgcgctgcagcatcgcgacccgtcgcatctgaagcaggtgccgcagcccgagaacctcgggctgatggggcggcccgagcgccacgcgagacccagctggctggcgccgtcgcagctccagctgtctgccggcccgaccccgggcacgacgaacaatgtcccgggggccgctcgcggcatgctcgccgctacggtgcctgccaacgcgtccacaggaacaccgcccggcgctgagtctccgcagcttccgctctggctgcaggcggcggtccgcctcggcacgcggttcctgcgcattgccgctgccggggagccgcccgccacgtcggcgttcatgctgccggagacgtcgggctcggtgtgctgtgccgagtgcggacgcgtgcatgcgccggtcatggacgagtactacttctggctggtgaactccgagtactacgatccgggtgttctgaatcccgccgatccatccttgttccaggacccggactggggtgtcgtgccgcccgacatgacctcggactggcatcgccgtgaccgcctgccgcagctgctggcctggccgctgcggccgatggtgaagctcgcatggtgccgcgtgcataacggagaattccagaccccgcgcatcatcgacgacggcgcgcatgtcgatcctgccggcggcgagccacagctcgaattcctgggccgcgaggttgactcccttcggttccggatcacgaacgcggcggcgctcccgccgggccatacggacccgtcgccgtggggcttccgctacgacattacgccggataccgccgtcgtaacgcccgaggtgatcgcgacgcccctggcgccggcaccgctcgctccattgctgcaggcatatccgttcttcgtctatttcacctccggcgccccgcttgagccttcgctctactcgaccgcgatgacggtcgccggaacgctgcgcgcccactgccgcttcgaggcagccctgaaatggtacgagctctacttcgcgcctggcgacaaggacctgcgctgggcgacctgccgcacgccgcagccgccgtcgaccgggacgatccccgggaccaacgttcccggtggctcgaacgagccaaatccgaataccccggccaatcccccacagcccgctggccgcggcattgccgcagcatcgaccccgcgcgcggcggcgtcgacgcgcggtcgcatgcgcaccggccaggatccgtgctgcgacacactggtgaggacggagcttgcgtcccggcagcgaagcgtcgtcctggcgtatctcgagacgctgcttcagcatgcgcaggcggcaatgtgccggcattcccccgagggctacgccatggcgcggctgcgcctcgacacgctctcgagattcctcggcgagcggccgcgcacgatcttcggccaggatgatggcgccaaagcgcagacggtaaccgcgtttatcccgcggttcgccccgctcaacccgcgcctgatggagatctacgaccgcgtcgccgaccagctggacgccctgcaccgctgcctgacgaaggcgcggctggcgggcggcgtccccaatctggatacctcatattggggcgacaatccggtgcggcgcggatggaagaccgcggccgcgaactgccttgacgacgacggctgctgctgtccgcccagcccgtaccgcttccccttcctcatccagcgcgcggtggagacggcgaacgaggtccgcacgtttggcgccgagctgcaggccgcattcgagaaaggggatgccgagttcctcgcggccatgcgtgccgcgcacgaacgccagctcctcaacctgaccgaggagatccgccgcatggaattccgcgaagcggactggcaggtgcaggcactgcagaagaccaagcagggggcgcaggcgcggcggcaatattacagcgacctgatcgcgaatgggttgatcccgaaggagcaggcctaccagaacctgaccggcgtttccatgaccacgcgcgccgccggcaacatcgtggaaggtgtcggccaggtcatgaacctgattccggacaatacgaccggcgttgccgggatcgcgtccaccccggtgtcggtgttccagatgccgatcggcaccaagctggcccacgcgttcgccgcggccgccaggattctctacacggttgccgatatcaacggcacgcaggccggcctggcactgaccgagggtggatgggaccgtcgcgaggcggactggatcctccaggtcacggtgctcgatatcgagatccagcagatcgagcggcagatccttggcgccgagcggcgccgcggcgtggcgctgcgccagttgaacaacctggtgcagcagaagcagcaggcggcggagctgcaggacttcctgcgcgacaagttcaccaatcacgcgctctacctgttcctgcagcaggagacagcggcgctgcaccaccagatgttcgagatcgcctggtgctgggcacgccaggcacaacgcgcgttccagctggaacgcgagctgaccacgcagacgcaactgccaccggatatctgggacggtctgcacgaaggcctgctggccggcgagcggctgtcgacgtcgctgcgcgcaatggaaaaggcgtactacgaccagaaccggcgcgagcaggagctggtgacgcggctgtcgctgcggattgattttccgctcgcgttcctgcagctgaaggcgacaggcatgtgcgagatcgagattcccgaatggcgcctcgaccgcgaataccccggacactacctgcgccgcgtcaagagcgtcagcctgaccatcccctctgtcgtgggcccttacacgggcgtgcactgcaagctgacgctgctgagcagcgcgacccgcatcgagcccacgctgctcgacgtcgaagactgctgccctggcgaatgcacctgcggctgctgcgagcgccggcgctacgaggcgaccagggatgatccgcgcatcgtgaagcgctatggcgcaaccgaagcgatcgcaacttccaccgggcagaacgactcggggctgttcgagctcaatttccgcgacgagcgctacctgccgttcgaatacgccggggcggtcagccgctggcgcatcgagctgcccatcgagaccaacgcgttcgacattgacacggtaagcgacctgatcgtccagttgagctacaccgctcgcgaaggcggagcgctgctgcgcaaggcaagctgggccgccgcgtcctgcctgctgcccggcgcggggctgcgcttctttgactggaagcaggacttcgccgatgcgtggcagcggttcaaggcagccgtgccggcggcagaaatgcccggctgcacgcgtgcgctcacgctgcgcatgagccgcggcatgttcccgtacctgccgggccagcggccggtgcgcatgcgccgcgtcgaactgtggttcgaggcccaaggctgcagcggcgcgcgcaaccatgagatcgagttcgtgccagatcgcgactgcacatgcgaggacgacggcgaagcgtgctgcgaccgcttcttcctgacctgcgtggccagcgaggattggccgtgcctcttccatggtgtgatcgagtacccgttcccgtacctgagcgacgagagaccggtcgtgatcggcgacttcctgttcccggaagacgccggtgtggtacaccgtgcctatctggtgtgctcgtacgaggccggtccgccggaacgctgcttgccgaagctgccggcttgcgacggcgactgcatgacggtctgttgaagtaatgcccgtgcccgggccatagcaggagttggcaaatggagaagaagcccccacctgatgaaaacacggacctcccacgccgagggcacggctccgctgcgcgagcggcgaagactccgccgcctcaacagagcatgcccgggcatcttatcgagctgaggccgggcttctttctcaaccccgaccacattatcagcgtgcgggtgttgccggaggaggaaggcgacgtctatgcagtcctgcacctgtcgaatggcgacaagcagaaccttacccgcggcgagttcaccgccattaccggggaagagccgcgcccgccggcgcggctgccgcagaaaccactgaccgaatagcgttgctgctacgcggccctgccccccggatcaatgctggctcgccccggcagccccgatcccggtcatcgcacgcacgaactgcgcaccatagcgctggcgctcggtgctggcctgggtggagcggtccagcaccgacgccagccaggcgctggcgaaggccagcgtcatcgagaacagcgccgggttggcgtacgggaagatcgccttgtcatgatgcaggaagcccacccagaccgtcgggcccagcaccagcagcgccaccgctgacaccagcccggccaggctgccggccacggcgccgcgcgtggtcaggcctttccagaacatcgacaggaacagcaccgggaagttgaccgaggccgcgatcgccagcaccaggccggacaggaaggcgatgttctgcttctcgaacatcacgcccagcaccatggccagcacgccgatcaccagggtggccgccttggacacccggatctcgtccttctcgttggcctgcccgcggcggaacacgttggcgtacaggtcatgcgagaccgcggaagcgcccgacagggccaggcccgccaccaccgcgaggatggtcgcgaacgccaccgccgagataaagcccaggaagaaatcgccgccgatcgcgtgcgacaggtgcaccgccaccatattgctgccgccgatgatcttgccggccgcgtcgcggtaggccggatccgcgcccaccatcacgatcgcaccgaagcccaccaccaggatcagcacgtagaagtagccgatgaagccggtggcgtagagcacggacttgcgcgcctcgcgggcgtctgccaccgtgaagaagcgcatcaggatgtgcggcaggcccgcggtgccgaacatcatgcccacccccagcgagatcgcatcgatgggattggacaccagcccgcccggagacaggatcgccagccccttgtcatgcaccttcgccgcgccggcgaacatggcttccgggctgaagccgaagtacgccagcaccatcaccgccatgaaggtcacgccgcccagcagcagcgcggccttgatgatctgcacccaggtggtggccagcatgccgccgaacatcacatacagcaccatcaacaggccgacgatcaccacggcggactcatagctggtgccgaacagcagctcgatcagcttgccggcgccgaccatctgcgccaccaggtacatgatcaccaccgtcagcgtgccgcaggcggcggtgatccgcaccggcttctgcgccagccggtatgacaccacgtcggcaaaggtatagcggccaaggttgcgcagccgttcggcgacgatgaacaggatgatcggccagcccgccaccacgcccagcgcgtagatcagcccgtcatagcccttgtcgaacatcatcgcggagatgccgaggaaggaggcagccgagaccatgtcgccggcgatggccaggccgttctggaagccgctcagcccgcctccggcggcatagaagtcggatgccgagcgcgtgcggcgcgcggcccagcgggtaatgccgagcgtgaacagcacgaacagcaggaacatcacgatggcgctccagttcagcggccgcggcgcggcatcgccctggatggcgggggccgccgcggcggccatgctggcaagcccgagcagggccgcgcacaggtaacggttggcgggtttcatgcccggcactccttgcgcacgcgttcgttgagcggatccaggtcgcggttggcccggtacacgtagatcccggtcagcagcacggccgagacgatcaccgccacgccgacgggaatgcccaccgtcatcacacccgcgccgagcggtgtgccgagcgtggccggcgagaacgccagcagcaggataaagccgaagtagatcgccagcatgaccagcgtcagcgaccagcccaggcgggtccgcccgttggtcagccggatgaaatcggggtggttctggatggtttccagttgtcgcgcgtccatggtggtctcctttggcgcaagggtgggcgtggcgcctctgggtgggtgccatcgttgggtgattcgttgagacttgaactcttgcggcggtgtgctccctctccccgcatggggagagggagcacacatgcaatggcttgtcagttcatgcgatacgttcagatcgccccgaccggctgctcgtgcgtgaacttcggccgcatatcgagcacccgccgtgccttgccgaccgtggtgcgctcgatgccgtccgcatccaccacctgcacgcgcgtggtcacgcccacgtaggtcttgatctggtccttcagctcgcgctccagcatcgcgcggtcgtccgcgcagaggggtgccgaacctccgggccgcgcttcgacgcgcacttccagcttgtccaggtggccgtcgcgggtcaccaccagctggtactgcggcgccagcgccggcgtcttcaggatcagctcctcgatctgcgacgggaacacattgacgccgcggatgatcagcatgtcgtccgagcggccggtgatcttgccgatgcggcgcatcgaacgcgaggtgggcggcagcaggcgcgtcaggtcgcgcgtgcggtatcggatcaccggcagcgcttccttggtgagcgacgtgaacaccagttcgccctcttctccatccggcagcacctcgccggtgaccggatcgatgatctcggcgtagaagtggtcttcccagatcaccggaccgtccttgctctcgatgcattcgcaagcgacacccggccccatgacttcagacaggccgtagatgtccaccgcgtcgataccggcacgtgcctcgatttcggcgcgcatcgcatccgtccacggctcggcgccgaagatgcccaccttgagcgagctttccgacggatccatgccctggcgctccatctcctcgatcaggttcagcatgtatgacggcgtcaccatgatgatgttgggctcgaactcgcggatcagctgcacctgtttctcggtctgcccgccggacatggggatcaccgtgcagccggccttctcggcgccatagtgggcacccaggccgcccgtgaacaggccgtagccatagctgacatggaccaggtcgccggcgcggccgccggcggcgcggatcgagcgcgccaccacgctggcccaggtatcgatatccttcgcggtatagccgaccacggtcggcttgcccgtggtgccgctcgacgcatgcacgcgcgccaccttctcgcgcggcaccgcgaacatgccgaagggatagttgtcgcgcaggtcctgcttggtcaggaacgggaacttcgacaggtccgacagcgactgcaggtcgtccggatgcaccccggccgcatggaaggccttgcggtaatgcggcacgttgtcgtaggcatggcgcacgctccatttcagccgttccagctgcagcgcctgcagttcgtcgcggctggcgcgctcgatcggctccagctcgttggggttggggatgcgttgaaccattgtctactccatcatcgttatgattgcgccgcatttctattgggggccggcgccgggtactgcgactgcatcagatatgggaacggctctgtaccacgcggaagcggttggcgacgaaagccgcatccgacagcgaggcattggctgccgggttggcgccggtggcgtggaagtcgctgaacgcggccgactggttgacgaacacgcccccggtcaggttcagcgacagggccacgcccgcgtcctcggcggcttcgcggatgccctcggccatgccggcatcggtggtgtaggccgacaacgtcagtgcgccatgttccttcgcgccgcggtgcgccagcgcgatgctgtgcgcggtgttgtcggtggcgacgatgaacgagatcgggccgaacaattcctgcatgatcttgtcctcgtcgctggcgtccaccttgagcaccagcggcgtgcggatgcgcgcgccggggaactccgggtgctccagcacgcggctgtcggcgacgatctcgcccagtgcgcgcgacgattcgatgcgctgaaccaccccgtcgttctggatcgcgccgagcagctccaccgccttggccgcatcgctggtgagcctgaccacgccctccccgatcgccgcggccacctggtcgaagctgaggtgcccttccggcgtgtcgatgccgcccttcggcacatagatgttctgcggtgccgtgcacatctggcccgagtacagcgccagcgagaacgcgatattgcgcaccatgcccttgaagtcgctggtggagtggatcacgatctggttgacgccggccttctcggtatagacctgggcctggtgcgcgttgcgctccagccagttgccattggcgctgctgccggtgaagtcgatcaggcgcacttccgggcgcagcgccagcgtggacgccatgcgctcggtcgggtcgttggccaccagcgtgaccaggttggggtcgaagccggcttcctgcagcacctcgcgcgccacctcgacggtgatcgccagcggcaggatcgcgcccgggtgcggcttgaccaccaccgcgttgccggtcgccaggctggcgaacaggccgggatagccgttccaggtcgggaaggtgcagcagccgatcaccaggcccacgccgcgcggcaccacgctgtagcgcttctccatgcgcagcggctcgtgcttgccctgcggcttctcccagatggcctgcttcggaatgcggcgcatctcgtcccaggcgtaggccaccgcttccagcccgcggtcctgcgcgtgcgggccgccggcctggaaggccatcatgaaggcctggccggtggtgtgcattaccgcgtaggcaatctcgaagctgcggcggttcaggcgctgcaggatttccagcgacacgccgacccaggcttccggcccggccttgcgccaggccggcatgccttcggccatgccggcaaagagctggtcgaggtcgggcttcggataggtgatgcccagttctgcgccgtagggcgagacttccttgccggcctggccgacggtgcccggctgcgacagcgcgaacgggcggttcaggcgggcctcgaaggcagccttgccgtcggcgttggcggtttcgccgtagaccctggggctcggcatttcgctgaacgggctccagtagccgcgctcggcaatggcttgggtggcttgttccagcagcgcctggtggcgttcaaaaaacggatgggacacggcttgctccgggggcaaaatggtttgcgtatggttcgggatggcggcaagggattgccgcgggaagcgcttcaggtttcctggtcgaagtcgatcaccagcctgtcgctgacggcgtagctctggcagctgaggatgaagccgcgcgcgacttcgtagtcctccagcgcaaagttgacgtccatgtcgacctcgccttcgatgcgcttgcagcggcaggtcgagcagaccccgcccttgcatgagtaaggcagctcgatgccttgcgccagcgcggcatccagcaccgtctccttgttcttctccagcgtgaaggagcgcgtgcggccgtcctggatcaccgtgacctcgcactgctgctgccccacctgcttgtgcgcatgcgccgccgggcgggccgcgggaatgctggtggcaaacagctcgcgcttgatgcgggccttgtccacgccgttgtcgagcagcgcctgcgacacctcttccatcatcgagtgcgggccgcagataaaggcgatgtcgatgtcctgcggcttgacccagtgcttgagcaaggcattgaccttctcgccgtcgatgcggccgttgaacaggtcgatatccagctgctcgcggctgagcacgaacaccaggttgaagcgctgcaggtaggtgtccttcaggtcttccagctcttccttgaacagcaccgaagacgaggcgcggttgccgtagaacagcgtgaagcggctctggggctcggcctccagcgtagtcttgatgatcgacagcatcggcgtgatgccgctgccggcggcgaaggccacgtagtgcctcgcctgcgtggcagacagcggcacgtggaagtggccggatggcggcatcacttccagcttcatgccgggctgcagttgttcgttggcccagttggagaacaggccgccgtcgacgcgcttgatcgcgacgcgcagctgcgcgtcctgcaccgccgagcagatcgagtacgagcggcgcacgtcctcgccgccgatgccggtgcgcagcgtcaggtgctggccctggatgtagcggtaggtgtcggccagttcatccggcacggcaaaggtcacggccacggcatcgcgggtttcgcgggtgaccgaggccacggtcagttcatggaatttgctcatctcactaccccggtcaggctcagtgcgccttgaagtaatcgaacggttccttgcagtcgctgcagcggtacagggccttgcaggcggtcgagccgaactggctcaccagccgcgtgtgccgcgagccgcagtgcgggcacgccaccaccagcgccggcgccgccttgcggctgatgccgctgatgtcgatcacctgctgggccggcggcgcaatgccgtagccgcccaggctggccttgccgcgcggcgtcatccagtcggtggtccaggccggcgccagctgcgtgcgcacgcgcacgctggcaatgccctgcgcagccagcgtgcgctcgatctcctcccggatcacggtcatggccgggcagccggagtacgtcggggtgatggtgacgacgcaggcgtcgtcctcccatgccacgtcgcgcacaatgcctagatccaccaccgagatcaccgggatctcgggatcgggcaccgtatcgagccaggtccagacctgcccgagcgccgggcgtgcgatcgcttgcgcagtcatggcgttcaccagctggcgcccggataggcgcgctgcaggaactgcatttcggccagcaggtagccgaggtgttcggtatggcggccgtggcggccgccgctctgcgaccacgtgcccgcaggcagctgcagcgtggcttcttccagcaccgcggccacgtggcgctgccacggttcggccagtgatgcgggatccggcaccaggccggcctgcaccagcgcggcgtcgcccgcgtcggactcgaacagctcatcgctgaacatccacaggtcgttgaaggcatcctgcatgcggcggtggctctcttcgctgccgtcgcccaggcgcaccaccaggtcggcgctacggcgcacgtggtaggtcacttccttgagcgacttggcggcgatctcggcgatgcgggcatcggtcgagcgctgcagcccgtcgagcaggaagtagtgccaggtgtcgaacaggaactgccgcgccagcgtatcggcatagctgccgttgggctgctccaccagcagcgggttgcggaactggtgcgcgtcgcgcaggtaggccatctggtcggcgttgcggccggcgccctccacttccgcggcgtagcccagccacagccgggtctggccgatcaggtcgagcgcgacattggtcagcgcgatgtcctcttccagcgccgggccgcggccgcaccattccgacaggcgctggccaaggaccagcgtggcgtcgccgaggcgcagcaggtattcgagcttgtggttgtccatcatgcgggccgtatcagatgtgcttgacggcttccggcatcgggaagaacgtcgggtggcggtagaccttgctgttggccggctcgaacagcgggcccttgtcgccggggctgctggcgaccacgtcgccggccttcaccacccagacgctgacgccctcgttgcggcgcgtatagacgtcacgcgcgttgttgatcgccatttcgccgtcgggcgcgtgcaggctgcccacgtgcttgtgggccaggccgtgctggctgcggataaagatctcccaaagcggccactctttcatggcaacctcctgtgtcattgcgttggatggatggcggcgccgggcgccgcggggtcacgcggcggcgcgctgggcctgcttgtcggcgtgggtcaccagggcatcgcggaaccacgcgccctcttcccaggccttgacgcgggtgcgcaggcgctcgcggttgcaggggccgttgccctggatgacgttgtagaactcggaccagtcgatctcgccgaagtcatagtggccgcgctcctcgttccacttcagttcgggatccggaatggccaggcccaggtactctgcctgcggcacggtctggtcgaccatcttctggcgcagctcgtcattggagaacagcttgatgcgccattgcatggattgcgcgctgttgggcgaatcgccgtcggacgggccaaacatcatcagcgccggccaccaccagcgattgagcgcgtcctgcgccatctgcttctgctcgggggtgccgttgcacagcgacagcaggatgtcgtagccctggcgctggtggaacgactcttccttgcacacgcgcaccatggcgcgcgcatagggcccgaacgagcagcggcacagcggcacctggttgatgatggccgagccgtcgaccagccagccgatcatgccgatgtcggcccaactcagcgtcgggtagttgaagatgctggaatacttggccttgccggtgtgcaggtcgcccagcatctggtcgcgcgacacgcccagggtctcggccgcgctgtagagatacaggccatggccggcctcatcctggatcttggccagcaagactgccttgcgctccagcgtcggcgcgcgggtgacccagttgccttccggcagctggcccacgatctcggaatgggcatgctgcgagatctggcggaccagggtcttgcgataggcctccggcatccagtccttggcctcgatcttgatcccggcatcgacgcgcgcctggaactcgcgctcctgcggctccatttcttccatggcgcgaagcctcgtcgctcctgtctccaccagctgtgcgtacatcctttgctccgctcttggttgctctgaatcggggtcttgacctgcatcaacatcgtcagttgcaacggatggtagtgatacaatttgattcaatcaatctgcatttgtgtatcacttcagggagcggggccgatggcgacgccaggcacagatccggtttctccccgcgtggcgcggctggcacgcgggctgaagctgggcgccaattccatgctggtgaccttgttcggcgatgtggtggcgccgcggccgcaggccatctggctgggcagcctgatccggctggcggcgccgttcggcatcaatgaccggctggtgcgcaccgccaccttccgccttaccgccgacgactggctggccgcgaccaggatggggcggcgcagctactacgggctgtcagacgccggtttgcagcgtgtactgcacgctggcaagcgcatctatgcgggtgaggcatccgaatgggacggccgctggaccctggtgatggtgcgcggtgacgtacgcgccacggtccggcagaagctgaagcgggaattgctgtgggagggcttcggcgccatcgcgccgggggtgatggcccacccccaagcggacctcgcctcgctgcgcgaaatcctccaggccgcacgcgcgcaggacgatgtggcggtgatggaagcgagcagcctcgaggcgttttccatccggccgctgcaggcgctgatgcaccagaccttcaagctcggcgacgtggccgctgcctggcaggcactgctgcgccgctttgcgccgctggccgaagaggccgccgggcttgctccggccgatgctttcttcgtgcggacgctcctggtgcacgaataccggcgtgtgctgctgcgcgaccccaacctgcccgaagcgatgctgccgcaagactggcccggccgcaccgcgcgcggcttgtgccacaccctgtacggggcgctgctagacgccagcgaagactacctgcaccgcgtggtggaagcggcggacggttcgctgcacgatgccaaccggagcctgcgcctgcgctttggggcgggcgcgcaggcgggcaacgattaaccgggcatccggggaatcccggctgcgcacctgcgcatggaatcacccgtccttgaacaggaagctgtaggcgttcaatgccggtaccccgcccaggtgtgcaaagaggactttcgatccttgcggaaactcgccgcgacggaccatgtcgatcatgccctgcatggacttgccctcatagaccgggtccgtcatcatgccctccagcctggcgctgaggcggatggcttccagggtgccggccgaaggcaggccgtattcgggtccgccatagcgggtgtccagcaccacgtccgcttcagtgatgtcgcggccgaggccgaccagctccgcggtatggcgggcgatgcgcaggatctgcgcgcgcgtcggttccggcttggccgatgcatcgatgccgatgacccggtccgcgcggccgtcggcagcgaatccgaccaccatgcccgcctgcgtgctgccggtgaccgagcagaccacgatgtagtcgaacctgaagccgagtccggcttcctgctcccgcacttcctcggcgaagcctacgtagccgagaccgccgagcggatgctccgagcagcctgccggaatcgggtagggcttgccgcccgccttgcgcacgctctccatggcttcttcccagctggggcgaataccgatgtcgaagccttcgctgaccaggcgcacgtcggcccccatgatgcgtgacatctggatgttgcccacgcggtcataaaccgcgtcggagtagttgacccagttctcctgcaccagcacgcacttcagccccaggtgggccgcgatggcggcaacctggcgcgtgtggttcgactggatcccgccgatcgagaccagcgtatcggcgccctgcgccagcacgtctggaatgacgtattcgagcttgcgcgtcttgttgccgccaaaggcgagcccgctgttgcagtcgtcgcgcttggcatagagctcgaccttgccacccaggctttcgctcagccgcgatagcggatggatcggcgtcgggccgaaggtcagggaatgacgcggaaattgcttcaggttcatgactggctccaggttgcggttggcatgcgggcgccttgcagccgcaaagcccggcattcgcacggacgctgcgcgacgccgcatctggaatcatcataagaaggctggggcgaaaggtgcttgcaaagatctgcgacttcttgcacgataaatagacagcaagcacccagaaattctctttatttcgtagaaatggcaacaagcagaataaaatttcgttcgaaatccgagacctccgcacagcccgcgccggtgctggatcgcacggacaaggccatcctgcgcgccttgcagcgcgatgcgtccatctccaacctggccctggcgggcaaggtcagcctcagcccgcccgcatgcctgcgccgcgtggaacgcctgaaagcggatggcctgatccgcggcgtcgtggcgctgctgaacccggctcccctggacgcggggatgctggtcatcatcggggtcgtgctggaccggtccacgcccgagtccttcgccgcctttgagaaagcggcgcagaaggtatcaggctgtatggaatgccatgaagtcaccggcgagttcgactacatcatgatgctcaggaccaaggacagcgagagcttcaaccgcctccacgcggagcagttgctctacctgccgggcgtgcggcagattcgctcgttcatggtgctcaagcaggtgctgtcgacgacgcagtttccgatttgaggatcgggctggatccggctgcgcgggcgaagagaggagacagggaggggaattcggggcctgggcgaagcaggaaccccggcgccgttgctgccggggttccatctggccagccccttgattgttggggctggcgcgccgtccatcgctcagaatgagcgcggcaggcccaggacgtgttcggcgacgaaagagtagatcaggttggtggagatcggtgccacctggtacagccgcgtttcccggaacttgcgctccacgtcgtattcgcaggcaaagccgaaaccaccgtggaactgcaggcaggcgttgccggcttcccagctcgccttggcggccaggtacttggccatgttggcctgggcccccatgggctcgtgcttgtcaaacagctcacaggctttccagcgcatcaggttcgccgcttccagttcgataaaggactcggcgatcgggaactgcacgccctggttctggccgatggggcggccgaagacctcgcgttccctgacgtacttggtcacgcggtcgatgaaccaatagccgtcgccgatgcactcggccgcgatcagcgtgcgctcggcgttcaggccatcgaggatgtacttgaagcccttgccctcttcaccgatcaggttttcctcggggatttccaggccctcgaaaaacagttcattggtctcgtggttgaccatgttggggatggggcgcacggtcaggcccttcttctgcgcctcgtgcaggtccaccatgaagatggacatcccctcgctcttcttcttcacgtcggccagcggcgtggtgcgcgccagcaggatcatgaagtcgctgtgctggacgcggctgatccagaccttctggccgttgacgacgtagcgtccgtccttcttgaccgccgaggtcttgatcttggtggtgtcagtgccggtggtgggctcggtcacgcccatggactgcaggcgccattcccccgaggcaatcttcggcaggtacttgtccttctgtgccctggagccgtgccgcagcaacgtgcccatgttgtacatctggccgtggcaggcgccggagttgccgccgcagcggttgatctcttccatgatgaccgaggcttcggtcagacccaggccggaaccaccgtactcctgcggaatcagcgccgccagccagcccgccgcggtcagcgcattgacaaaggcctcgggataggcgcgctgctcgtccaccttgcggaagtactcatcgggaaactccgcgcaaagcgcgcggatggcgtcgcggatttcttggaagttgttcgattgggtctgttcgatcatggcgcttggcttgcgttcggtctctggcggacggccgcctccttgtgataaccgcaatagtcgcggcgttcggccggttggacaatcagcctttccgaaagcgcgccttccaccggggttaaggcctggcgacggttaaggcctttcgctttcgccaaagtccgccattggcattgtcaaatagcgcaaaccacgctttgggaacatgctccgggctatccggcgcatgcgccgactgaccgctgccccgtggacatgcacaccctcgcctcccgcctgcaagccctgatccgccccggagaccatatctggtgggggcaagccaccgccgagccgctgacgctgacgcgcgcactggtggagcaccgccacgccatcgcccagggcggacggctcagtgtctttgtcggcatcgggcagtcagacacgctgcagccggcccaggcggatgtgctcgacttcttcggctacgccgccagcggcccgcaccggcaactggccagggccggcgtgctggacatcgtgcccagccactattcgcacctgcccgggctgatccgccagggcacgctgcgggcggacgtggcgctggtgcaggtctcgcccgccgacgagcaggggcgccacagcctggggctggtgcatgaatacctccccgcggcgctcgaccgcgcccgcgtcatcatcgccgaggtgaaccctgaggtgccttggacccacggcagccgctacctgagcgcggacgatatcgacctgcagatcgaagcgctgcacccgccgatcagccttgaccgcagcgcgcccggcgcggccgaacaggccatcgcccgtcacatcgccggctgggtggaggatggcgccaccctgcagatgggcatcggcaacctgccagaggccgtggtcgctgcgctgaatggccaccgcgacctggggctgcacagcggcgcgatcggcgacggcattgcggcgctggccgaagccggggtgctgaccaacgcacgcaagagcatcgatacgggcgtgggcatcgccggcatcctgatgggcagcgaacggctgcggcgctgggcccaccgcaatccgcagctgcagctgcgcgagaccgcctatacccatcaccccgaggtgctggccagcgtcgacaagctgaccgccatcaactccgccatcgaggtcgacctcaccggccaggtgaacgccgaagttgccgccggcgtctatgtcggcgccgtcggcggtgccgtggacttcctgcgcggcgccgcgcgcagccgcggcggcctgcccatagtcgcgctgccagcaaccgccaagggcgcgagccgcatcgtggcccagttgtccggcccggtcagcacgccccgctcggacgcgggcctgatcgtcaccgaacacggcgtggccgacctgcgcggccagacgctgtcgcagcgcgtgcgccgcatgctggacattgccgcacccgaacaccgcgcggacctggaacgccaggcccacgccctgctgcgtcagtgcggcgcggccttcgtggcccttcccgggcacacgctggccaactgacttacttgctcatcccaacacagagttccaaggagacttccatgcgcagagctgcaatcgtcactcccctccgcacgcccgtcggcaccttcggcggcagcttgcgcccggtgcctgtggaggaactggccgccaccgccgtgcgcgccgtggtggaacgcagcggcatcgatcccgcgcgtatcgacgacgtggtctttgcccagtcctacgccaacagcgaagtgccctgcgtcggccgctgggccgcgctgcaggccggcctgccggtcgaggtgccgggcatgcagctggaccgccgctgcggcggcggcctgcaggccatcgtcacggcctcgatgatggtgcaaagcggcgccgccgacgtggtgatcgcgggcggcgtcgagagcatgagcaatatcgagtactacaccaccgacatgcgctggggcgcgcgctcgggcaatgtgcgcttcttcgaccgcctcgaccgtggccgtgaacgctcccagccggtcgagcgcttcggcaagatctccgggatgatcgagaccgccgagaacctggcgcgcgactacggcatcagccgcgaggcggccgatgtcttcgccgcccgcagccacgcacgcgccgcggcagcctgggaggccggccgcttcgatgccgaggtcgtgcccgtgcaggtgccccagcgcaagggcgatccggtgcggttcgcgcgcgacgaaggcttccgcccggaaaccacgcgtgaaagccttggcaagctgcgcacgctgatgccgaacggtaccgtcaccgctggcaacgccagccagcagaatgacgcgtcggccgcctgcctgatcgtggccgaagacaagctggccgaactgtgcctgacccccatggcctcgctggtgggctgggcggcggccggctgcgagccctcgcacatgggcatcggcccggtgcccgcggtgaagaagctgctggcgcgcctgaacctgacgctggaccagatggacctggtcgagctgaacgaagccttcgcctgccaggtgctggccgtgctcaagggctgggaatggcatgaccaggatgcgatcgagcagaagctgaacgtgaacggctcgggcatctcgctgggccatccgatcggcgccaccggcgtgcgcatcctggccacgctgctgcatgaactgcagcgccgtggcggccgctatggcctggaaaccatgtgcatcggcggcggccagggtattgccgcggtcttcgaacgctactgagaaaacccactccattcaccgtacagcccccgtgcgcgacggcgggggctgagcctgccttttgccttttgcttttcggcttttgccatcggctctttgctttacgtaggagaagtatcttgatttccacctcacgccgccacgccatgctggccgccctggctctgtgcggcgcaaccctggctactccccctgcctcggcacagcccaacggccagccggtgcgcctcgtggtcggctacgcggccggcggccccgccgaccaggccgcgcgcctgtttgcggtggcgttgggcaaggcgctcaacgccaacgtcatcgtcgacaacaagcccggcgccaatgccacgctggccggctatgaagtggtccgcgccaggcccgacggcgccacgctgtggttcgccgccagcgcggcgctgacggtcgcgcccaacatcatgaagagcctgccgtacgacccggccaaggacctcgccccggtggcaccggtggcgcgctactacaacatgctggtggccaacgtcaaggagccgttcaagggcacccaggacctggttgcctacgccagggcgcatcccggcaagctcagctacggctcctcgggcgtcggcagctccaaccacgtcgccatggccctgttcgcccggcaggcgcaggtccagctgaaccatattccctacaagggcaatgccccggccatgaccgacaccatcggcggccagatcgacgtgatgttcgatatcatcagcaccgccagcggctatgtgcagagcggcaaggtcaagcccatcgccgtgggctcgcccaagcgcagcgcatcgctgcccggcgtgcccaccttccgcgaatccgggattgccggcctcaaggactacgaagccggcggctggtacgccatctacgcccccaagggcgtaacccccgagcagacccagaagctggccgcagcagtgcggcaggccgtggaagacgttgagctcaggaagcgctatgccgaactgggctacgaacagtggagcggcaccacgcaggatgtcgtgaacaccgccgcgcgcgagcgcacgcagtgggccagcgtgctcaagggcgtgacgctggactgatggtcccgccccctcgaaccgacaccgacccgacacccaggaagaaccgacatgatccgcgataacgacatcctcgaagccctgctcgacagcgtgcgccgctttgtgcgcgagcgcctggtgcccgccgaggcgctggtcgccgagaccgacgaaatcccgcaggatatcgtgcaggacatgcgcgagatgggcctgttcggcatgaccatccccgagggctttggcggcctggagctgaccatggaggaggaagtgcgcgtggtcatggagctgtgccagacctcgccggccttccgctcgctgctgggcaccaccgtgggcatcggctcgcagggcatcctgatggatggcacgccggagcagcaggccgcgtggctgccccgcctggccaccggcgagatcctggcctcctttgccctgaccgaaccggatgccggctcggacgccggttcgctgcgcaccaccgcggtcaggaatggcgaccactacgtggtcaacggcaccaagcgctttatcaccaacgcgccgcaggccggcatgttcacgctgatggcgcgtaccaaccctgaaatcaagggctcggccggcgtctcggcatttatcgtcgatgccaggacgcccggcatcagcttcggcaagcgcgacgtgaagatggggcagaaaggcgcgcatacctgcgacgtgatcttcgacaacgtgcgcgtaccggccgagaacctgatcggcctgaaggaaggccagggcttcaagacggcgatgaaggtgctcgacaagggccggctgcacattgcggcggtcagcgtcggggtggccaggcgcgtgctgcgcgacgcgctgaactacgcactggagcgccagcagttcggccagccgatctgcgagttccagctgatccaggccatgctggccgacagccaggccgagctttatgccgccgaatgcatggtgatcgacgccgcgcgccgccgcgacgaaggcaggaacgtctccaccgaagcctcgtgctgcaagatgttcgccaccgagatggtgggccgcgtggcggaccgcgcggtacagattctcggcggttccggctatatttccgagttcggcatcgagcgcttctaccgcgatgtgcgcctgttccgcctgtatgagggcaccacgcagatccagcaggtcatcatcgcgcgcaacatgatccgtgaggcccgcggcgcgtaagcaccgcgccccgcgccaatacacctgaaccatgcccgcgcgcaacgctgcccgtccccaggacgggcagcctgccttgagaccgcctgacctgacatgacagattccaccgctacgccggccgctggccttcctcccccctccgcccgcaccggcgccctgagtcacctgcgcgtgctcgatctctcgcgcgtgctggccggaccgtggtcaacccagaacctggcggacatgggcgccgacgtgatcaagatcgaaaaacccggcgaaggcgacgatacgcgccactgggggccccctttcctcgccgacgaggccggcgcgccgacccggcaggcttgctatttcaccgccgccaaccgcaacaagcgctcggtcaccgtggacatggccacgcccgagggacaggagctgatccgcgagctggcccggcagagcgatgtggtggtggagaatttcaagaccggcggcctcaagcgctacgggctggactatgacagcctgagcgcgctcaacccgcgcctgatctattgctcggtcacggggtttggccacaccggaccctacgcggcgcggcccggctacgacctgctgatccaggccatgagcggcctgatgagcatcaccggccacgccgacggcgagcccggcggcggcccgatgaaggtaggcgtggccgtgatcgacctgttcaccggcatgtacgccaccaccgcgatcctgagcgcgctggaagcgcgccacttcaccggccgcggccagcatatcgacatcgccctgctggatgtggcgatggcggtgctggccaaccagggcgcgggcttcctgaacgccggcgacgtgccgcggcgccaaggcaatatccaccctagcgtggtgccctaccaggacttcccgaccgccgacggcaatatgctgctggccatcggcaacgacgggcagttcgcacgcttctgcgacgccgcgggcgtggactgggcgcgcgacgagcgctatgccaccaataccggccgcgtcaacaaccgcaagacgctgatcgcgatgatgatggagctcacgcgcacccggtccacggcgcaatgggtcgcgctgctggaagccaattccgtgccttgcggccccatcaacaatatcgcccaggcccacgccgacccccatgtgcaacaccgtggcctgcgcgtcgagcaagagcgctatccgggagcccagccgcccgccggcgagccagtgaaccacgtggtcaccacggccagcccgctgcgcctgtcagagacgcccccgacgctgcgctacgccccgcccgcgctgggccagcacaccgacgaggtgctgcgcgactacctgaagctgagcccgcagcaactggaagcactgcgcgccaggcgcgtggtgtaagcggccaggcggctttcggcagacaagaaatccgcctttgccgattaccgattgcaccgtgcaacgggcgcacatacactggcgccgttcggctggcccccgcctcgccgaacggtttttccagcacaaggattcccgcgagatgccaccggaccgagacaccccaccacggatcagcgacatccctcgccgctgggccgccgagacccccggccatgtggccgtcttcgaggaaggccggaccaccacctatgcgcagctgtgggcgggcatcgaggatgcgcagcgctacctgcaagcgcagggcgtgggcaccggcgatcgggtgctgatcacggccgagaactgcctggcggtgatcacgctggtgttcgccttgtcggaactgggcgcgtggccggtcgtcgtcaacgcccgcctgtcggagcgggaaatcgaggtgatccgcgcccactgccagccgcgcctgatgctgttcacccacgcggtgtcgcccgatgccctgcggcacggcgtgcgctaccgggccagggagattgccccggccggcctcggcccgctgatggcgggcgctgtcgacgaggccggcgagcgcgagcctgaagcgctcgcgcgtgatgtcgccgcgttgatctatacctccggcaccaccggacagcccaagggcgtgatggtcacccaccggggcctgctgcactttgcgcgcgtcacggtcgagtcgcgccgcatgcaggcagacgactgcgcctatgcggtcatgccgatgtcgcatgtgttcgggctggggacgctgctggtctcgaccctgcaggccggcgccagcctgtacctgagcgcgcgtttcaatgccgctgatgtcaccgccgcgatccggcagggtgcgatcacgctgctgcagggcgtgccgacaatgttcaaccgcatcgtcgcccatgtgcgggcaacgggcacgcccctgcaggcttcgccgcggctgcgctatctctacaccggcggcgggccgcttgatccgacgctcaagcacgacgtcgaggcgatgttcggccagccgctgcaccatggctacggcatgaccgaatatgcggggtcgctgttcgtgacccgcatggaccggccgcgcaccgattgctcggcgggcgagatcgtcgaaggtgcagagctgcgggtagtcgggccggagggcaagccggtgccgcaggggcaacccggcgagctatggatcagggggcccggcgtgatgcgcggctactaccgcgcaccggacctgagcgccgaggccctgcggcccgacggctggctcaataccggcgacatcggccggctggaccccggcggcgcgctgttcatcgtcggccgcaccaaggacctgatcatccgctcgggcttcaatgtctacccgatcgaagtcgaatcggtcatcaacacgcatccgtccgtgcgcgtatcagccgtcatcgggcagcccaccgcggacggcaacgaggaagtgatcgccttcgtcgagatcagggatggcgagaaatttgacgcgcaggcgctgcacgactacctggtcgaccgcctgtcgccgtacaagcgcccggagcggatcctgcgcgttgcctcgatccccaccacggccagcggcaagctgctgaagcaccagctacggcagatgctggcggacaaggcctagtccgccgggcgccctcagtcctggcgcccgagtccgtcctcgaccagcaggtccaccagcttgcgcgcaaacagcggcaaggcgccgaggtcggccacgcatatctgcagcttgcgctcggcccattcatcgttgagctggacgatgcgcagcgccatcgtcttcgcatggcggctggcggtagtctccggcaacacgccgacgccgacattggcctcgatcatccggcacgcggtctcgaagttgctgacctgcacgcgccagcgcagcgtgcgctgcaggtcggtcgcggcccgcaacaggaaattgtggatcgcgctggcctcgggcaggccgatgaagtcgtagtccagcgtatcgataaaatccacgctgccgcgctcggccagcggatggctcagcgcggtggccagcaccaggcggtcgcgccggtacggcatcacctccagcccttccgtgcgcacgttgccggcaatgatgccgatatccaccatgccctcctgcaccgcgcgcacgatatccgggctcaggcgctcgtgcatgtcgatggtcacgtccggatggctgacgagataactgcgcagcaccgccggcaggaattcgctcatcgcggtggtgttggcgaacacgcgcacatggcctttcacgcccgccgcatattcctgcagatcgccgctcagttgctccagctggcgcagcacgcggcgcgcgtgggcgagcagggtctcccccgccccggtcaccttcacgccctggctgctgcggctcagcagcttgacgccgacgtgttcctcgaggttcttgatgcgcgtgctggccgcggccagcgacaggtgcgagcgttgcgcaccgccggtcaggctctgggcctccgcaatatgcgtgaacagtttcaggtcgaccagatcaaagcgcatgacatcattccgcagcgtaagggcggattatctcgcaaagcgcggcgttcagtacactctggcgggcgcaattcgcagtggccggcaccctcgcatccgggacctgatcccggatccttgcgaacgtccggtagatttttgggaacgagtcaggcgacggagcgccgccgctgcgctgcgcgcgcgaccgccaaccggctggcagcttccatcgataagccgaagcggtcgtagaaagcgcagtccagatcactgctggctggccagccgacgcgccgccgggcatcgccaatgccggcatcaccggccatgacctcgaacagcaaccgcatcagccgttgcgtgcggcacagctcggtcagcgccgtgccctgcgaaaacagcatgcggcgcagctgtgccgtggacatgcccagccgttccgcgataaacgcggcattccaggcgtaatggggttgcaggaagacccgcttgcagatgcggtggtgcaggcattcctgctgcgccgcggggatcatgcgctggatttcgagggtgcacgcggccggctgagtgctgctgccatccaggtgcagcgcaaaggtttcaaacggttcgatggtgagctgctggcccggcagcagcacacgctcatagccgcggcgcctgagcaccagcctgccgtgggccgcagagaccgccagcgggaaagccagcaacagccgctgcaggctgacgtgcatgtgggactgcagatggacgtgcatggtggctcgggatgcggacaggatcagactgcatgatcgccgctaatcggattgcccgcctctgccatttccgaatgcaccgttcaccgccgccccatggccgttcgtgtacgatggactcccgcactgccgaatcagaagcccgttgcgtcaacccgcgccagtgctgacttctcgtgcatgccagaggaaacgccggatccggcatacccccgtcaacgtgtacgggttctcgtcgtctcgggcaagggacagtgagcacctgcgcgaagcagtccaacgaattcgcgctcaagtcagtgcagtctcgctatttccgcttctaatacgggaaagcgctggccgaattcactgataagtggttgattttccggaaaacgcagcctcacgaattccggatcctcgcacttcaacggccattgtgatggataaaaccgaaggcgccgcttgatgcggatcctggctagaccacccctcaccccggccctctccccatgaggggaaagggagaacatcttgcttaggctggttccggtggctttggcgcacccaagactgttggcattttgtctgggtgctcgctctcccgcttggggagagatcaccgcacgcaggccatgccgacttgctcgaagatcacgcggtgaacggcaggctgcgatgccgcttgccggtgagcgccgcgacggcgttggccagtgccggtgcgatcggcggcaccgcggtctcgccaatgccggtcggcgggtcggccgatggcacgatgtgcaccgcgatctgcggcggcgtgtccgcatgcgtcgccactcggtagtcgttccagttgccttgctggaccacgccatccttcagcgtgatctgggctccgggcagcgtggtgcccagccccatcatcatgccgccctggacctgcgcctcgaccgtgcgcggattgatcggcatattgcagtggacggccgcggtgacccggtgcaccaccggctggttgccgcgcatcgaggcctcgacgatgtaggccaccacggtgtcgaacgattcatgcaccgccacgccccaggcacgcccggccgagagacgccgcttgccgtagcccgagcgctcgaccgccaggtccagcgccgccaggtgacgcttgtgctcacgcagcagcgtgcggcggtaggccaccggatcgatcccgccggcgcgcgccagttcatcgaccagagtctccatcacgtaggccgtgtgcgtgtgccccaccgagcgccaccacagcaccggcacattgaccttggggtgatggatctcgagcgcgatcgggaacggataaggactgtcgctcacgccctcgaccatggtcgagtcgaccccgttcttcacggtgaaggactcgaacggcgtgccgctggtgatggactggccgacgatcacgtgcttccaggccagcaccttgcccttgccatcgtggccgatgtcaacgcggtgcaggtgcatcgggcggtagtagccgccgcgcacgtcgtcttcgcgcgtccagatcatcttgatcggctcgcgccggccggccgcgtagcgcgccttggccacctgcgcggcctcgaacaggtagtcggacgtgggcacggcacgccggccgaagccgccgccggccatcatggtgttgaatgtcacctgttccggcttcaggccgagcacggctgcgacgttggcctggtcgacggtctggaactgcgagccggcccacaccgtgcattggttgccgcggaagtcgatggtgcagttgagcggctccatcggcgtgtgcgccaggtaggggaagacatactcggcggtgagcttgtgtggcgcggtggcaagcgccgaagtgtccgccgccttggcctgcacgccgggcctggccgccagctcgcgatagcgcgccagcagcgcatcgctatccggcttctcgacgccgctgctgtcccattccacctgcagcacctcgcgcgccgtgcgcgcgggccagaagccattggccacgatcgccaacccggtcgcgccgccggccagcggcacctggtagacctcttccacgccggcgatggccctggcacgcgccgggtcgaagcgcgcgaccctggcgccgaacaccggcggatgcaccatgaccacggtacgcgtgccgggcagcgccgtgtcgatgccgaactgctgcctgccggtggacttgtcgcgcgcatcgagccggccggtgggcttgccgatcagcctgaactgctgcggcgacttcagctgcacgcttgctggcaccggctcggccaaggccgcggcggccagctcgccgtacgtggcccggcggccgtcgggcgcggtcaccacgccggcctcggccttcagctgcccggccgggaccccgaagcgcctggcggccgccccgagcagcatggcgcgcatgcgcgcgccgacctcgcgatactgggtccacgagttcttcatgctggtcgagccgccgaccatctggatatggaacaccggatccttataggcctcgccggccggggccagctggcagcgcaccgtgctccagtccgcgtccagttcctcggccaccagcatcggcagtgccgtctgcacgccctgcccgaactcaagcttgccgatcgtgaccatcacggtgccgtcggcatcgatactgatgaaggccgatggctgcactggcgccttgggctgcgcggccgcctccgtctgcgcgccaagcggaacggcacagagcgcgaagcccgagccgaagctcagtttcaggaaggtccgccggtcgatgccgccgcttgcctgctgcatgagtctcatggcatctcctcagccgatagccttggctgcatccttgaccgcggcatggatgcgcgcgtaggtgccacagcggcacaggttggcgctcatggcctgttcgatgtcggcatcggtcgggcgccggttgaccctgagcagcgccaccgccgacatgacctggccgctctgacaatagccgcactgcgtgacgtcgttgcgcacccaggcctcttcgaccgcgcgccccaccgggtcctcgccgatgccctcgatcgtggtgagctgccggccggcgatggaagacaccggtgtcacgcacgcgcggcgctgctggccatcgacatgtaccgtgcacgcgccgcacacggcgatgccgcagccgaacttggtgccggtcaggcccagcgtgtcgcgcagcacccacagcaccggcgtgtcgccgggcacgtcaacctgctgggtcttgccgttcagttgaaaggaaatcatggctggctcccgttgctggtgcctttcgtctgggtcaaggcgcctgatccggcgatagcgcgcaggttcttcagcaaggcttcgtcggcggcggcgcgtgtagggccggcagaggtgcgcaacggctcgcgcgtatcgcacggcgcgccgttgcgtatccactggcgcacctgctcgtcgaacgcgggcttgtccagcggcggcaattcacgccccggccccggttgccagccccaagccaccaggtggtcggtcaccatgtgttcttcgagcatcgccagcgaacggccgccattggtcctggtgtcccggaagaccttgcatagcgccggcccggacaggcccagccatgacatcttcatcttcgccggcggcatgtgccagcccggctggccattggtatccagcccgggcggcgcatgcgcgagcgggctgttctgggtgccatggcacgtggcgcattgcagcggcggcacgcccttgccgtcggtgcctcgctgcaccggtggaaaatgcacccgtttcgcatcgccctgcagcgggccgtccggcacgtggcaattcaggcagcgggcatgcagcagcacacgctcgatctgcgcgaaggcctgcagccccgcattgcggtccggcgtggccgacacctgcgtgggctggaaggatccgccgggcccggcagcgaaggcaagcaccggaagcgtcaggaccgaccccgccaagagctggcgaatggcggcgacgagggggttgcgggcgtcatgcttcatggagcctcctccttcaccgtcgtcggcgtgctagatcgttgtagtgcctgatgcgatccctggcaagacgaaacggcagcagaggccccaggcgcccggatcggcaagcagcacttttgcgggatggtcaccagcgctgcaatgtcgcgatgaagttctatgatgcagaatcatgcagacgaagcgcactgccgatcgaaggcatggcgcgctccgatcaaacggcctgtgatgcatatggaccaagattcgcgacaagacgcctctgatggatcggtgatgttcgcggacgtctgcgacagcaccaggctctacgagcaggccggcgatgcggcggcgcttggcgcaatccgccagtgcctggcgctgatgaagtcccactccgcggccgcgcaaggccgggtggtcaagaccatcggtgacgaaatcatggtgctgtttcccaccgcggagaatgcgatgcgggcggcactggacatgcaggaggccgtcgccgggctgccgccgatcatcggcgctccgctggcgatccatatcggctttcaccatggcccgatcctgtcggatgaatccggcgacctgttcggcgacaccgtcaacctcgccgcccgactggccagcctggcgtcgcggggccagatcatcaccagcaagaacgcggtggagcagctctcagcagggctgcgccagatgacacgctacctgtatccgatacaggtgcgcggcaagcaccaggtgatcgagctgtacgaagcgatctggcagcagagcatcgacctgaccctggtggccccggtggatcttgcattggcccgctcggcactgctttcgctgcggtatcgggaaaccgtcttcgaaatgaacaccgcctcgccgcctgtcaccatcggccgggacacgaccatgagcattgtcgtcacggaccggcaggtttcgagattccaggcgacggtggagccgcgcggcggccgctttgtcctgatcgacagaagctcgaacggcacccatgtgaagatcgatggcgaaagcgcgctcatcctgcgccgtgacgaaatcacgctcaggggtcatggctggattacctttgcccagccgaaagaatgcatcgacgaaggtatcgagttctttgtcgacgagaagtaatgctggcaggaaggaagccgcgcggccgcaacccataggagcaggccgcggcccgcgcgtggctgcttaccctcccagttcctggaaggcgtgcccgttggcttccagacccttcaacatgccaggtggcagtgcgctctccggaaccgtcccttcaagttgccactcctttgcgtcggcgaggtcctgaagtcgttcccccttgcgcacatagagacccagcgtcggcttcagcagattgatgtaaaagtcgtactcctgcatttgcgaacctcccacgaaagtcgtgattgccctggctcttgcgctcaagcgccggagtctcctgctgcgacggtgctgtccgccttcctgggtgcagcgcccttggcggcagctttgcctgccttcggcttcttgacggcttccatcttcctgaagaccacggcttcgcttgccttgtcgtagccaagctcgacgctgtcgcctgatttcagcttgtcgccgaggatctccttggccaggccggtctcgaccgattggcggatctggcgccgcagttcccgcgcaccaaactcaggctggtagcccacctcgaccaggtgatcgaccagctcatcatcgagcttgaccgtgatgtcctgcgcggcggcggtgcgcaccacacgctccagctggatctgcacgatcgcgcggatgttctcgcgcgacagcgcatggaacacgatgatgtcgtcgattcggttcaggaactcgggccggaagtgtcccttcagcaccttcatcagcgcctcgcgcaagtccttctcaggcatgcgcttgtcctcgggctgctccaggttgtccatgatgatcggcgcgcccaggttgctggtggcgatgatgacggtattgctgaagtccaccacgcggcccttgccgtcggtcaagcggccgtcgtcgaagacctgcagcagtacgttgttcacgtccgggtgggccttctcgatctcatccagcaggatcacgctatagggcttgcgccgcacgcgctcggtcagctgcccgccttcgtcatagccgacatagcccggcggcgcaccgatcagccgggccaccgcatggcgctccatgtactcggacatgtcgatgcggatgatggcctgctcgtcgccgaacacggtttccgccagggccttggccagctcggtcttgccaacgccggtcggcccgaggaagaggaaggtcgcgatcgggcggttagcctgccccaggcctgcgcgcgacaggcgcaccgcatcgctgaccgcgaccaccgcgtcgtcctgccccaccacccgctcgcgcagccgcgcttccattttcagcagcttctggcgctcttcctgggtaaggtcggtcaccgggatgccggtcaggcgcgacaccacttcggcaatggccgcaaccgtcacctccagggtctccgaccccgtcttgcgctgccacgcctcggtcaactcgtcaagccgcttctgcttgtcgttgatgcggtcctcgaagcccttggcctcgtcaaagcgcttgcgcgacgacgcatagtcctgctcgcgcttgagctgggcgatctcggcctccagttcctggatatccgcggggcgtgaggtggcgccgatgcgcacgcgcgccgcggcctggtcgatcaggtcgatggccttgtccggcaggaagcgcgcggtgatgtagcggtccgacagttccgccgcggccacaaaggcgtcgtcggcgaaggtgacctggtggtgcgcctcaagcttgtcgcgcaggccgcgcaggatgacgatggtctgctcgacggtcggctccggcaccagcaccggctggaagcgccgttccagcgccgcgtctttctcgatgtacttctggtattcgttcagcgtggtggcgccgatcaggctcagttcgccgcgcgccagcgccggcttgagcacgttggcgatatcgagcccgccctcgccgccgccctgccccgcgccgacgatggtgtgcagttcgtcgataaacaggatcagttcgtcgttcttggcggtgacctcgtcaatcagctgcttggcacgctcctcgaactcgccgcggtacttggcgcccgccaccatcgaattgatgttcacctcaaccaggcgcttgccgcgcagcacctccggcacatcgccattgacgatgcgctgcgccagcccttccacgatcgcggtcttgcccacgccaggctcgccaatcagcaccgggttgttcttcttgcgccgcgccagcacttcgatcgcgctctcgatctcctgcgcacggcccagcaccggatcgagcttgccctgccgcgcgatcgcggtcaggtcgcgcccgaacttgtccagcgtgggcgtgccggtgggcgtatcgacgcggccatcctcggcgcccttgccgaccaccttcaccaccttctggcgcagtgcctcgggggtgacgccatacttcttgagcagcgtcccggcgatgctttccgggaccgaggccaggccgatcagcaggtgctcggggccaacgtaggaatgcccgaggtcgcgcgaggcctggaaggcatactggaaggccttcttcagccgcggcgagatcgtcatccggtcgatggccgcgtcaggccctgcggttccggtctgcgcgtgctcgtcgatatagcccctgatatcctgcggcgagagctttagctccttgagcagcgccgagcagacatcggtatcggcgagcacgtagagcaggtgctcggtgtccagctcattgcgccgcagctcgtgcgccttctccgcggcgcgctgcagcagttccatggtctgctcgctgaaggcatcggtggggtcgacggattcgcgcgggacttcggtggagaatccgggatgctcgtcgtcatccatcccgcctcccattcctcggaagaagcgggacagcccgccgccacccagcagggagtcgaacgggttgagcatgtcctggtggcgcagcagctgccggtagtcgtagtcgcagatcgacatcgtcttgcgctcgccgtcctgaaccaccgtcacccgcgccacggcgggacgtgcgttgcagatttcgcatagggtcggcatgatggactttcctccacaggtaggtcgcattgcttcaacagagggccgttgcgcgcgctcggggccgcgcacaacggcgctggaaagcgggcatgagccgtgcttacgtgatggtgggctcgcctgccattacgtcacctccgaacgcaccacgcgcacgggcactgacttgtaggacggggtgccgctgtcctcgtcgatgtagtcgagcggcaccagcctgtttgcttccggatagtaggcagcgacggagccaggcgcaatttcatattcgatcgcagtgatcttctcgaaacgcagctgccggcccgcggcgatggtctcgatgtcgaccaggtcgccatgctccaggccgcgcgcggccaggtcggccgggttcatgaacagcacgtcgcgccgcccgaacacgccccggtagcggtcgtccatggcatagatggtggtgttgtactggtcatggctgcggatggtcaccagccgcagcacatcgtcggcatggacttgtttgtcttcatgcagccccttgaacacgtagaactcggccttgcccgacgacgtttcccatttgcgctcggttggtggcaagggcatgcggaatccgccagggacccgcacgcgcgcgttgaaatcctcaaagccgggcaccgtcttctcgatcaggtcgcggatcctgtcgtagtcggcgacgagctccagccatggcaccttgctgtcaggcagggtcgcggtggcaatgcccgccacgatggccggctcggagcgcaggaattccgacgccggcgcgagcttgccggccgaggcatgcaccatcgacatcgaatcctccaccgtcaccgattgcggcccggtctcctgcacatccagttcggtgcggcccaggcaaggcagcacataggtctccctggccaccagcaggtgcgtgcggttgagcttggtcccgacatgcacgctcaggtcgagcttgcccatggccgggaagcactgctcgggatcgggcaaggcgaccgcgaaattcccgcccaggcagaacagcgccctggacttgccatcgatcatcgcctgcatcgcgttgacggcatcgtgcccgtgtccggcgggcgggctgaagccgaaggtgtcctcgatccgctgcaggaagccggccgacggcttctcggtaatgccgacagtccggttcccctggacattggagtggccgcgcaaggggcagatgccggcgccgggcttgccgaagttgccgcgcagcatcagcaggtcgcacagcaggcgcacattggccgtgccttcgttgtgctgggtcacgcccatgccataggtaacgatggtggcattcgacttggcataggccgccgcgaccagttccaggtccgcacgggtcagcccactggtcttttcaatatccgcccattcggtcgaccgcagatcgtcggccagcgcctcgaagccctcggtgtggaccgcgatgaagtcgtgatccagcacattgccctggctggcttccaggtccagcagcgccttcatcacccccttgatggcggcggcgtcgccaccggcgcggaccaggaagtaggacgacgcaatccgggtggaaccataggtggccatctccaccatgttctgcgggtcggcaaagcgctcgagcgcccgttcgcgcagcgggttgaacaccaggatcggcaccttgcggcgcgacgcctcatgcagcgtccccatcatgcgcgggtggttggtgcccgggttgtggccgatcgaaatgatcagctcgcaggtgtcaaagtcctccagcgacaccgtgcccttgccgatgccgatcgagcgcggcaagcccacgctggtgggctcgtggcacatgttcgagcagtcggggaagttgttcgtgccatattcgcgcgcgaacagctggtacaggtaggcggcttcgttggaagcccggcccgaggtatagaactcgacctggtcgggcgatagcccgcgcaggatttcgccgatgcgggcgaacgcggcctcccattccaccgcgcggaaggtgtcggtggcgcggtcatagaccaggggatgcgtcagcctgccaaagtcttcgagctcatagtcggtccggttcaacagcgacgacaccgtattggttgcaaagaactcgggaggcacccgtttggtggttgcctcccacgtcacggccttggcgccgttctcgcagaactggaaggtcgaccggtgctccttgtcgggccatgcgcagccggggcaatcgaagccgtcgggctggttggtccgcatcagcgtgatcggcgccttgacggtatccatctgcgtgcggatcgccgtggcagttgccttcagcgccccccagccgccggcgggaccgtcgtacttcctgataccgggcacttcgcgtcgattggccatgtttgctccttgtgccgcgccaggttgctggtgacggcgttggggttagtcacgcgaacaactcctgctgccggtttgcacccctcgcccgctcgcgggagaggggtgcgtgtgcctgggctcgtggtgcggatgctccttcaggaatagagcttcgccacccgctccagcggcaccggcttgatccgcgaggcctgcccggcgcagccgaaggcctcgaagcgcagcttgaccacgcttctcgcccccttcttggccgccagcagcgccttgcgcggatcgaattcgctgcggtcgtcggacaaggacttgcggatggccccggtcatggccaggcggatatccgtatcgatattcaccttgcgcacccccatcttgatgccgcgcaggatctcctcgaccggcacgccgtaggtctccttgatgtcgccgccgtactggcggatgatctccagccattcctgcggcaccgagctggagccgtgcatcaccaggtgggtgtcagggatctgctcgtggatctcgcggatgcggtccatcgccaggatgtcgccggtgggcttgcgtgagaacttgtaggcgccgtggctggtgccgatggcgatcgccagtgcatccacgccggtgcgggcaacgaagtcgcgcgcctgggccgggtcggtcagcatcatgtcgtgcgacagcgtgcccgccgcgcccacgccgtcctcttcgccggcctggccggtttcgagcgagcccaggcagcccagttcgccttccaccgacacgccgatcgcatgcgccatctcgcacacgcgccgcgtgacctcgacgttgtagtcgtagtcggagggggtcttcatgtcttcgcgcagcgagccgtccatcatcacgctggtgaagccggagcggatcgaggcctggcagatcgccgggctggagccgtggtcctggtgcagcacgatggggatatccggatgggtctcggccgcggccagcaccatatggcgcaggtaagcctcgccagcatacttgcgggcgccggccgaggcctgcaggatgaccgggctgtcggtttcctgggccgcctccatgatggcgtggatctgttccaggttgttgacgttgaaggccggcacgccgtagccgaactctcccgcgtggtccagcagctggcgcaaggaaatgagtgccatgatgaagctcctttactgattgcagaatcggtgaggtcgggttcaggcagcggcgcgctgtgccagcacggccagcgcgggcagcgtcttgccctccaggaattccaggaacgcgccgccgccggtcgagatatagcccacgcggtcggcaatgccgtgcttggcgatcgcggccagcgtgtcgccgccgccggcgatcgagaacgccttcgattcagcgatggcctgggccagcaccctggtgccgttgccgaactggtcgaactcgaacacgcccaccgggccgttccagacgatggtgccggcggccttgagctgctcggccagcatcgcggcggtcttggggccgatgtccaggatcatgtcgtcgtcggccacgtccttgacgtccttgacggtggccgcggcagtggcgctgaattccttggcgcacaccacgtcgaccggaatcggcaccgaggcgccacgcctggccatgatgtcgatgatggccctggcatcggccagcaggtcaggctcggccagcgacttgccgatcttcaggccggcggccagcatgaaggtattggcaatgccgccgccgacgatcaggttgtcgaccttgtcggccagcgacttcaggatggtcagcttggtcgagaccttggagccggccacgatcgccaccagcggacgcgccggctggcccagcgccttgcccagcgcgtcgatctcggcggccagcagcgggccggcgcaggcaatgggggcgtacctggcgatgccatgcgtggtcgcctcggcgcggtgggcggtgccgaacgcgtcgttgacgtagacatcgcacagcgccgccattttctgcgccagttcgtcgctgttcttcttctcgcccgtgttcatgcggcagttttccagcagcaccacctgcccgggcggcacctggaagccgccctcggtccagccggacaagagcggcacctggcggcccagcagttcggacaggcggcggcccaccggcgccaggctgtggcgcgggtcgggcgccccctcctgcggccggcccaggtgcgaggtgaccatcaccgcggcgcccgcctgcaggcaggccgcgatggcgggcacggaagcccggatgcgggtatcgtcggtgatagcgcccgctgcatcctgcgggacgttgaggtcggcgcggatgaagacccgcttgccagccagtccaccggctgcaagcagtgcggccagcgtgtgcggcgccgccgcgggtttcggttgcgggttcgtagcatgggataggctcatcatggcgatctgctagcgtgcgtgggccaacgccaccgcggtatccagcatgcggttggagaagccccattcgttgtcataccaggccgacaccttgaccagggtgccgttgaccttggtcagggtggcgtcgaaggtggacgacgccgggttgtggttgaagtccaccgagaccagcggcgcggtgttgtagtccaggatgcccttgagctcgccttctgcggcggccttcaggatgccgttcacctcctccaccgtggtcggccgcgccgccacgaaggacaggtcgaccagcgacacattgatggtcggcacgcgcacggcaaaaccgtccagccggccgtccagctcaggcattaccagcccgaccgcggcggctgcgccggtcttggtcgggatcatcgacatggtggccgagcgcgcccggcgcaggtcttcgtggtagacgtcggtcagcacctggtcgttggtataggagtgcacggtggtcatcaggccgttcaccagccccagcttctcgtgcagcggcttgaccagcggcgccaggcagttggtggtgcaggaggcgttggagatcaccgtgtcggtggccttcagcacgccgtggttgacgccgtagacgatggtggcgtccacgtccttgccgccgggggcggagatgatcaccttcttcgcgccgcccctcaggtgggccgaggccttttccttgctggtgaagagcccggtgcattccatcaccacgtccacgcccagctcgccccacggcagctcggccgggttgcgctgcgccagcacgcggatccggtcgccgttgacgcggaaggcatcgccgtcgaccgagacctcgcccgggaagcggccgtggacggtgtcgtactgggtcaggtgcgcattggtggccgcgttgccgaggtcgttgatggcgacgatctcgatatcgtgccgcttgccgccttcatagtgggcgcgcagcacattgcggccgatgcgtccgtagccgttgatggcaaccttgatagtcatgctgtctcctttacttgtcttggtatccttgccggtcgcgctggcgcgccggcgcaacatcaggcggctggcgccagccgcgccggcgtcagcagcgccggcaacgcctccagcgaatcgagcagcgcatccgcgcccagcgccgcgggcccgccggggccggcgtagccatagcgaaccaggcagaccgggatgccggccgcgcgcgccgccgccacgtccaccgccgaatcccccaccagcacgccctgcgccgtatcgacgtcgagcaggttgcaggcgtggcgcagcggttcgggatccggtttcatctgcgcgatcgagtcgcccgccaccagcacttcgaggtactgcgacaacccggtcagcgccagcagcggcaccgccagcgcgcgcggcttgttggtgacgcaggcaagccggtagccctggcgcctgagcgcctccaggcctgcctccacgcccgggaacaccgacccgaggcggccgttggtctcggcatagtggcggtggaacatcgccacggcttcggcggcctcaacccgcggcgtaagcccggcggtctcgagcacgcgccgcaccaggttgggcacgccgcggccgatgaagccggccacggtgtcgaacggcaatgccgggctgccgaagtcggccagcatgcggttggcggcctcgacaatatcgggcgcgctgtcgaccagcgtgccgtccaggtcgatcagcaccgcggtgcagggcatggatacggtagccatcacgcctcctccagcagcacgcgcgcggccgcggcgacatgcgccggggtcaggccgaagtgctggtacagcgcctcggccggcgcggattcgccgaaggtgtcgatgcccagcgccaggccctgctcgcccaccacgccgcgccagaaccaggtgccgcccgcctccacgctgacgcgcggcaggccaggtggcagcacggtgtcgcggtacgccacgtcctgcgcgtagaacagctccacgcagggcatggacaccacgcgcgcggcgatgccggcatcggccaggtccagcgccgcgcgcatggcgatttccacctcggagccagtggcaatcagcaccacgcgcggcgccggcacatcgcgcagcacatagccgccgcgcgcaatctccgcgcgctgggccggattgcgctcgaacggcatcagcgcctgccgcgacagcaccaggcagctcgggccatcctcgcgccgcagcgcggccagccacgcgtacgcggtctcggcgccgtcgcagggacgccagacctggttgttggggatcaggcgcaggctggcggcgtgttccaccggctggtgggtgggaccgtcctcgccgagcccgatcgagtcatgggtcagcacgtggaccacgcgcaggcgcatcagcgccgccatgcggatggcattgcgcgagtagtccgagaaggtcatgaaggtgccgccgtaggggatcagcccgccatgcagcgcaatgccgttcatcgcggcggccatgccgaactcgcgcacgccgtagctcacgtagttgccatgcccggcatggttgacccagaccgacgccttgacattggtcaggttggacccggtcaggtcggccgagccgcccagcagctcgggcaaggcgggcgtgagcgcctccaggcacagctgcgatgccttgcgcgtggcgatcttgccttgcagcggcgacggcgcgtccagcaacgccatcaattcggcatcgaagccctcgggcaggcggccattggcacggcgcacgaattcttcggccagttcggggtgcgcggcgcaatagctgacgaagcgcgcctcccattcggcctcgcgcgcggcgccttgcgcgcgtgcatcccaggcgtcggcgacatccgccggcaccgtgaagggctcggcttcccagcccagcgcggtgcgcatggcggcgatctccggcgcgcccagcggggcgccgtgcacgtcgtgcccgccggccttggcgggcgcgcccttgccgatcacggtgcggcagcagatcagcgtgggccggtcgcgctcggccttggcctcgtgcagcgcggcatcgagggcgtgcgcatcgtgtccgtcgacgtccgcaatcacatgccagccataggcggcaaagcgcttcggggtgtcgtcggcaaaccagccggcgacctcgccgtcgatggagatgccgttgtcgtcgtacaggcagatcagcttgcccagcctgagcgtgcccgccagcgagcaggcctcgtggctgagtccttccatcaggcagccatcgccaaggaagacgtaggtgtggtggtcgacgatgtcgaagccgggccggttgaaggtggcggccaggagcttctccgccagcgccatgccgacggcattggccaggccctgtcccagcggcccggtggtggtttccacgcccggcgtcacgccaagctccggatggccgggcgtggccgcgtgcagctggcggaactggcgcagctgcgacatcggcaggtcgtagccggtcaggtgcagcagcgcatactgcagcatggacgcatggccgttggacagcacgaagcggtcacggtcgggccaggccgggttggccgggttgtgtcgcaggtggcgccgccacagcacttcggccatttcggccatgcccatgggtgcgccggggtggcccgatttggcctgctccaccgcgtcggcggccaggaagcgcagcgcgttggcacagcgcgctgcggaatcgatgcgttctggtgcgttcattcaggagatcctcgcgagtcggcgtttcacggtcgagtccttactgcgcggcgcgcttgcggcgctccatcatgcgcagcacgaagggcgtgaagatcagctgcatggccagctccatcttgccgccgggcaccacgatggtgttggcgcgcgacatgaaggagtcgtggatcatgctcagcaggtactggaagtcgatccccttcgggttggcaaagcggatcaccaccatgctttcatcgggcgcggggatttcgcgcgagataaaggggttggacgtatccacgcacggcacgcgctggaagttcacatgcgtgcgcgagaactgcggacagatgtaattcacgtagtccggcatgcggcgcaggatggtgtcggtcacggcctcggtcgaatagccgcgctgcttcttgtcgcgccagagcttctggatccattccaggttgatgacagggaccacgccgatcagcaggttgggatactgggcgacattgaccgaatcggtgaccacgccgccgtgcaggccctcgtagaacagcagatcggtatcggccggcagcggctcccactgcgtgaaggtgccgggttcctgcccgaacggcgcggcttcctccgggctatgcaggtagtgccggtgcatgcccgtgccggtttcggcataggagcggaacaggttctccagctcgccgaacaggttgttctcctcgccgaagtggctgaagttcatattgccggtgcgctcggcctcggccatcttgaccttcatctcggcgcggtcatagcggtggaagctgtcgccttcgatcaccactgacttcacgccctcgcggcggaagatgttctcgaaggtacgggtcaccgacgtggtaccggcgcccgaggagccggtgatggcgataatgggataacgttctgacatggccaggcacctcaggcagacgcgcggaacaggctgcgctcgttgaacaggggactcggaaggtcgggatcggtctggtcggtgtggtagccctcgatccgttccacttcattgcgcgagccgaagatcacgccaatgcgctggtgcagcgcacccggcgccaccgacatcagcgtctgccggcccgtgctggcgcgcccgccagcctgctccatcaggaaggcgatcggattggcctcgtacagcaggcgcaggcggcccggcttggcgggatccttggagtcgcgcgggtacatgaagacgccgccacgcatcaggatgcggtgcgcctcggccaccatcgacgcgatccagcgcatattgaaatccttgccgcgcggcccgctcttgccggccatgcactcggcgatgtagcgctgcaccggcgcttcccagaagcggctgttcgacgcattgatggcaaattcctgggtatcggccggcacctgcaggttggggtgcgtgaggaagaactcgcccaggttgggatcgagcgtgaagccgttgacgccattgcccacggtcagcaccagcatggtggtgggaccgtagagcgcgtagccggccgccacctgggcgctgccgggctgcaggaaatcctgctcggtgacggcgcttgcgccctcaggcgcgcgcagcaccgagaagatgctgcccaccgagacattgacgtcgatgttggatgagccgtcgagcggatcgaacaccagcaggtacttgccgcgcgggtagtgatccgggatctggtaaggcgcctccatctcctccgacgccatgccggccaggtacccgccccactcgttgacgcgcaggaaggtggtattgctcagcacgtccagcttctgctggatttcgccctgcacgttgacggcccctgcttctccggcttgattgctggccttgccgtgcaagccccccagcgcgccgaaggcaaccgcgcgcgcgatttccttgcaggccatggcgacgttgagaatcaggccgttgaagccgccgctggcatccggatagcggcggcgttcctcgatcaggaactgcgtcagggtcatcctttggacttcaggcatgacaggtctcctatagattggctatgcattcttgtgtggtgccggtgcggggcgggctacgtgaccgtggcggcctcgcgcaagcggtaaaggatgctcgagtagccgccgtcggcatcgggcgcgccgaacacggcgctgccggcaacgaaggtgtcggcgcccgctcgcgcgatcgcggcaatgttgtcggccttgacgccgccgtcgatctccagccagaccggccgcccgccggcgtccacctgccggtcgatgcgcgcgcgtgcctggcgcaccttgtccagcacgcccggaatgaaggcctggccgccaaagcccgggttcacgctcatcagcagcaccaggtcgagctggtccagcgtatggtccagccagcccagcggcgtggccgggttgagcaccaggcctgccttgcagccgtggtcgcggatcaggccgatggtgcggtcgacatggcggctcgcctccggatggaagctgatgatgttggcgccggccttggcgaacagcgggatcagcgcatcgaccggttccaccatcagatgcacgtcgatggggatggagaccagcggccggatcgcctcgcacaccagcgggccaatggtcaggttgggcacatagtggttgtccatcacatcgaagtgcaccaggtctgcaccgccggcctcgatcgcgcacacctcttcgcccaggcgcgcgaaatcggccgacaggatggatggcgccaggcggatggcacgctggctgccatggccggtgttgagttcagtggcatgcatgtcaggttgcctcgatcagggtgccgtggtgccaggcgcgcaacgcggcaaggtcggcccagcggtttgccgcgccgggcacgtgctggggcatgggctcgccgggatcgccaagatgcggcagcaccagcagcgcgccctcgaaggagtcctgcgcgctgaacgcggtgggcgtgaccacggtgggaatgccggccgcccgggcggcgcgcaggccgttcgccgagtcctcgatcgccaggcagtcaccgccttccaggcccagccgctccagcaccgccaggtagacatcgggcgccggcttcttgatggccgtggtgccggcgtcgccgatggcggcaaagcgacggcgccagtcggcgccaagcggcgcctgcagcagcgcgtcgaggttggccggcgtggtggtggtggcaatcgccagcgggagcccggcctcgccggcctcgtcgatcaggcgggcaatgcccgggcgcagcggcaggccgcccgccccgacgcgctcggcatagtggcgggtcttgatggcgtgcacggcgtcgatggtttccttcaccttgcagccgcgggcctcttccgggtcgaccatgcgccagtaatgcatcaggcgctccttgccgccggccaccttgagcaggcgcgtgtagagcggcgcgtcccagtaccagtccaggccgacctcggcgaaggcggcgttgaaggcttgcaggtgcgcgctttcggtatcggccagggtgccgtcgacatcgaaaatcagggcttgcatggcttactccttggccggcgtccgtgcgtccggcgcggccttcgaaaacacgcggctggcaagcaggtcagacgccgtgatggtggtcagggtatggtcgtcgacgaccgtgccggcatcgtccagcaggcgcgaggcatggcgcagccgcgcgcggtccagcgcattgcgcacgctgcgggcattggcaaagtgcggctgtgtcatgcgccgggccaggtagtcggcaaacacggcccggctttcgtcgtcgaagcggtattgcatctcggacagcatcaggtcggcgatctggcgcagctcgtcgagctggtagtcggggaagtcgacatggtgggcaacgcgcgaggacatgcccgggttggactcgaagaaacggtccatgcggtccttgtagccggccaggatcaccaccaggtcgtcgcggttgttctccatcacctgcagcaggatctcgatggcctcctggccgtagtcgcgttcgttctccgggcggtagaggtagtaggcctcgtcgatgaagagcaccccgcccatggccttcttcaggatctccttggtcttgggcgcggtatggccgatgtactggccgaccaggtcgtcgcgggtcaccgccaccaggtggccgcggcgcacgtagcccagctggtgcaggatctgcgccatgcgcatggccacggtggtcttgccggtgccgggattgccggtgaagcacatatgcaggctgggcgcaccggcgctgaagccgcgcgcggcgcgcagcttgtccaccagcagcaaggcggcgatatcgcggatgcgcgctttcaccggcttcagcccgatcagctcgcggtcaagctgggccagcagctcggtgatgcccgagctggccagcgactcggccagggacccgggcaacgatgcggccggagcggctggcggctgcagcggtgcggtcgtttcaggtgcggacatggcaggctccgtgaggatcaatcgagcatccgactcgaaagattcgaggcgcaactcccccccggtgcgcggccttgcggcggcgcaaccgtgggattgcacagtcaggaaatcgccggcggcagcgccatgacggcgctgcgccggttcagccggcgccgctcagtagcggctgccctcggggcgtgcctgcacagcgtagctctcgatcgagtagcgcatggtgcggccgggctcttcctgtcgcaccaggcggaagccgggctcgtccgcaggacggttgacgatgaacgacatcaccaccgactccaccgtatgcgtcgaatcgaaggccgtgacgcggatgtagtggttggggaaggtgctgcgcgcgttgttgatctccagcaggatgccggcggcatcgcgcaggtcgaacatcggcaggccgaacatctcccagtaggtattgcgcggatgcgggtcgtcggtgtactcgatgccgaccgcccagccctggttcaggcagtattcaagctggctggtgatctgcgcgtcggtgaggtcgggcaggaaggagaaagtgccttgagtaatacgcatgatgtcctctcgttctttgggttcgctcgtcgtgctttggtggcgtcgcgccagggctcaggccaccgacgcggtgggcgcgaagtccgaggtgtcggtcggcgtgtagttgaagctgatgtcgccccaggtatcgagcgcagcccgcagcggtccgcaccagcgcgcggcatcgcgcaggatctccggcccttcgttgaggatgtcgcggccttcgttgcgcgccagcaccatcgcttccagcgcaacgcggttggcggtggcgccggcctggatgccctgcgggtggccgatggtgccgccaccgaactgcagcaccacgtcgtcgccgaagaggctgatcagctggtgcatctggccggcgtggatgccgcccgaggccaccggcatcaccttgcgcagcgaagcccagtcctggtcgaagaacagcccgcgcgacaggtcggcatgggtgtaggcatcgcggcagacgttgtagtagccctgcacggtcagcggatcgccttccagcttgcccaccgcggtgccggtgtgcatgtggtcgacaccggccaggcgcagccatttggcaatcacgcggaacgacacgccgtggttcttctgccgggtgtaggtgccatggcccgcgcggtgcaggtgcaggatcatgtcgttctggcggcaccagttgctcatggactggatacaggtccagccgacgatcaggtcgatcatgatgatgaccgagcccagcgacttggcgaactcggcacgccggtacatctcttccatggtgccggcggtcacgttgaggtagctgcccttgacctcgccggttgccgccgaggccttgttgaccgcgtccatcacgaacaggaagcggtcgcgccagtgcatgaagggctgcgagttgatgttctcgtcatccttcatgaagtccagcccgcccttcaggccctcatacaccacgcggccgtagttgcggcccgacaggcccagcttgggcttggtggtggcgcccagcagcggacggccgaacttgtccaggcgctcgcgctcgacgatgatgccggtggacgggccggcgaaggtcttcacgtaggcgaccgggaagcgcatgtcttccaggcgcgccgccttgatcggcttgaagctgaagacgttgccgatgatcgacgcggtcaggttggcgatcgagccttcctcgaacagcgacaggtcataggccacgtagcagaagaactgctcggggttgttgggcaccgggtcgacccggtaggccttggcacggtacatgtcgcaggcggtcaggcggtcggtccacaccaccgtccaggtggcggtggaggactcgccggcaaccgcggcggcggcctcgaccggatccacgccgtcctgcggcgtgatgcggaacagcgccagcaggtcggtatccttgggctcgtagtcgccgtcccagtaccccatttccttgtacttcatgacgccggcgtcgtagcgcttgcgcggcttggcttggaccgattcaggtgcgttcatgcttgtctccttgcgtggttgagcgtcttggctgctgcgttgatgcaaagatataagcccacccacataaggtaaattcagatattcttagcccctgtataagcaatcccttaagtgcggaccaagctgcacatcacgggaccatccaaagccgcccccaaccgcccatgtcgtccttcctgcgcgcccttacccttcgccagttgcagatcttcgtcaccgtggccaggcacgccagcttcgtgcgcgcggccgaagaactgcacctgacccagcctgcggtctcgatgcaggtcaagcagcttgaatccgtggtcggcatggcgctgttcgagcgggtcaagggacagctcacgctgaccgagcccggcgaccgcctgctgcaccatgcgtcccggatcctcggcgaggtcaaggacgccgaggaaggcttgcaggcggtcaaggacgtcgagcagggctcgatcacgatcgggctgatcagcacgtcgaagtacttcgcccccaagctgctggccggctttaccgcgctgcacccgggcgtggatctgcgcatcgccgaaggcaaccgggaaacgctgctgcggctgctgcaggacaacgccatcgacctcgcgctgatgggccgcccgccgcgcgaactggatgcggtgtcggaacccatcgccgcgcatccgcacgtgctggtggcctcgccgcggcacccgttacacgatgcaaaggggttcgacctgcaggaactgcgtcacgagaccttcctgctgcgcgaaccgggttcaggcacccgcaccgtggcggagtacatgttccgggaccacctgttcacgccggccaaggtgatcaccctgggcagcaacgagaccatcaagcaggccgtgatggccggcatgggcatcagcctgttgtcgctgcacacgctgggactggagctgcgcaccggcgagatcgggctgctggacgtggccggcacgccgatcgagcgcatctggcatgttgcgcatatgtccagcaagcgtttgtcgccggccagcgagagctgccgcgcctatttgctggagcacactgcggagtttctggggagggagtacggggggctgatgcccgggcggcgggtggcctgaggttccaggagggttggctgggattagagagccatccgtcccgtcccggtcggaacccactgggcagcggcggctggtgaaggccttcggatgacaaaggctagagagaattgcgaatcctcttgatcaagctgcagcttgatcggactgctgcggagcatttcccctcggactgaggcgaatgtctggcgcggccgctacgagggcagtcctgatggcggttggtcatactggggaatgaaggataaccgcagcttcggctgcggttatttaccgttccggcccctgaagcgcttgtgaggggacgccgtctcgcggctggcggccaaccggcgcgatggccacaggacgtttcggtcagcgttgccgtctggttaagcttcattgggacaacacaggccgcgccacgctcgatgccttagcgcaggaacacgtatggctaccggtcccttaccgttcggacgtcaggctccgacatacggccagaatccctagaacgtccgcgatggtcggacgtgaatactgccgcgcccttcccgcgagcgttcccgaactgtactgcgacacgcagaagcattgcagccagcattatcataccgggcaccgcatagccggcatgttgcgggaagcgagtcaggaaggagcctgcgaatatgatcgcgatgacccagacaccagtgagatgcaatctcttccagttgtccgggccgacaaggcgcatcggagtttcgaacgacgtgatcgtcaacaatagaatagctacatagccgatcgtgccagggacgttgctcgcaggcgagcgccccaaccagaaggcttcgggcgccgtgctgctgtagacgaggattgctaacgcatgcagaaaatgagcgaaggcgaatgacagcccgagatagcgtcgctcacgcaccaacgctcgcgtcagagccgatgacacaagtttcgccagcgaagacgccgtgaacacgaccagaaacagaacaaacgatactcgtgcagttgcgcgtaccgtatcctgtaacgcttgcagcgggtcgggtgccaatgtgtatgacaacgccgctaccagcgccaccaaggccgacaacaaaaagaaaagtctccaacgggtcattatcgctcctcgccagttgtagatgttgtaccgtccggtgcaaccgagatgccgatttcgaacgggtaacgcccaagcactgcagcagcttgcttgagattggaagcgtggagttcgacagaaatccggattccgcccggcgcggctgtggtcgccatgacttcctcacaatcgatcccggcttcggcaagcgccaagcgcgccacgtcagcggcctcgcgccgcctcagttccggcttgaagatcttgccgacacccgtgagcggaatcctgtcgacgatcctgattcgcttgggcaacgcggcacgctcaccgatttcggcgcggatgaactcggcgagctcggactcagtcgccgtggagccaggtgtgagctgcacatatgccactggcaactcgcccgcgtacacgtcggggcgacccacggcggcggcgatctggaccgacggatggcgatgaagtggctcctcgattgcagtgggatcaatattgtggccacctcgaatgatcaggtccttcatgcgtccgacaagccagaaatagccgtcggtatcgcaacgacccaggtctccggtgttgagccagcgcctgccgtcgcccagttcgagccagagcttctcgctctgttcgtcacgcaagtagccgccgaacacgttcgctcccgagatgaccagcagccccacttcaccgatggaacagtcacgcacgtaccggccggcatcatcgacaacaaccgctttcatttcctgacccgggacgcgcaggccgatcgagccgagcctgcggtcgccgttcggaggattgactgcgcttacgcacgtcccctctgtcagaccatagccctcaaggatccggattcccgttcgttcctgaaaagtgcggaaaacttcggctggcatcggcgcagcgccacacaggccatattcaagtgaactgatatcgtgcgcgttgacggggacgtccagaagcgaagcatagagcgttggcaccgcgccgaagaagttgacgcgatggtgcgctacgatctcccagaatcgctggaccacaccttcaccgcgaaaaccatgaggcgttccgagtatgacgtgagcacctctggagaaaggcagtaagccagtcgccatgacggcattgacatggaaaagcggaaggccacaaaagatcgtcttgccaggaccgatgctttccccgaaaaactggcccgcgctccaggcgttggcgacttcattaccatgacatcgcatggcaatcttcggcataccagtggtaccgcccgtacagaagtaagacgacgagtcgccggcgttgaaacggcgagcgctgtcaagcctggttcccgattcacgcgcgatggtggtaccgaagtcgtgcaactggaggtgcgccgggaccgcgcgacccagcgcgccatcctccgccgccattcggtcggcgaaacgccgtgggcctggcacgcgatcagccatattcacgagcacaagatgccgcaaggacgggatcttgtgcagaacgggctgcactttttgccaaaggtcggccccggggaaaggtgccagcgtcacaaggacgctggcaccggctgcgccgagcaactcggcgatcgcctcgccttcgagaagcggactgatagcgcaaacgatacccgctgcttggccaccccagatcaccaaatgcgtttcgggcaagttggggagaacatacccgatcactgaacgcggccctgcaccgatcctgccgaacatgtttgccgtccgcgtgatgtcccggatcagttccccataactccagcactcgatatcgcgaaatgcgtcggcgcaaggaaagtatgagagcgctggcgccgacggattgatggccgcgccacggcagatcatctcgtatgtactgtgaggcaggtccgccggcatgccttgcgtttcgatggcaaggacttcgttctggttggcaatgcccttcatggtgtctcccgttggctgatggcgagtgtcacgctccaaccctttcgccatgcgcgcggtgagcgggtgcctttgctccttgtgtaaggtcaggcgcagaattcctcggaccgcactcgccatagtcgaagttggccaggtggcaggcaaactgcttcaatagcgcgggcgcgtccatcttcggcaggttcagttcgacaaaaacaagacagtccgcggattcggcgcggccgagcgccacgtccagctcgcctaccgtgcgcacctcgatcgatagcgacctgtcgtgccggtcgaaggcacgggccaggtccgtataccgccagttgtcgacatcgttatatgcggagttctctcccaggatcatccgctctatcgtgtatccgccgttgttcagcaggaagattaccggcttcaagcctcggcgcagtatcgaagacagttcctgggcagtgaactggaacgagccgtcgccgatgaaaagcaggtgccgccgcgacgacgcacccacatgcgagccgaacagcgccggcaacgaaaagccgacagcgccccacgttggcgccgcaatgtaacttgcgcccgccggcaagctcatcgaaacaagccccgcatgcgcagtgccggcttcgcccacgatcacatcaccgggctgcaggaaccggcggacgcgaggccagagtgtggcgtgcgtcaggggggcatcgtcggataccggcgccggatcggtgaggttcgcaggggcagacaactcacccgcgagcggtcgggaattggacttcgcactctcgtgaactccggcgagtacgtcccgtagcgtgacgcccggcatctgggtcgtaccgatactcagatcgtgccggcgcagatcgataaaggactccatattgattcgctgtgagaatagcgccgtgctcgagtcggtgaagcgcaggcccacgccgatcaggcagtccgtgttctcgacgacgtggcgcactgatgcggcgctcgcggcaccggcgtagctgccgatatagtggctgcaagtttcatcgattgcgcccttcgccggcatgagcgatgcgcatgggatggcacacttttccgcgatcttgacgataaggtccgtcacgccaaaacgatccgcgtctgcgtcgacaagcaacacgggagcgcgggcggcgtcgagcgcttcgacaatgcgctgaaccgcgacgcggagttgccgcggatcgctcgcagggtcggcaagcaagagtggcgcgtccggcacttcaacgacgatgtgggtgacatccgacggtaactgcaggtgtacgggccggcgctccagccagcaggatcgcaatacccgatcgatctcgtatgcggcgttggcaggcgtgatacgcgcttgggcaacggtgaactcggacatgcagcggccgatgttctcgtaatcgccgtccaccagcgtatggtggacgagcgcaccactgttgactgcgtggagcggcggcgcgcccgtgatatgtacgaccggcacgttctcggcgtacgctcccgcgatgcctccgatggcggcgagatctccgaccccaaaggtggtgacaaacgccgcaaggcccgaagtacgggcatacccgtccgcagcgtaggcggcattcaactcattgcagtttccgacgaactcgataccacgggcatcatggatctgctcgaggaacgacaggttaaagtcgccaggcacgccaaaaacgtgacgtacacccgcctccttgagtctgcgggcaaggaatgtcccgatttgcatacgcatgatgatgtcactccacggtgaagggtcattgcagggctggccgtgaactcgaaccgcagaccgtcctggcttcaatcaaaccgctactgcggtgcagcgtgctcgcatgctacgagcggaccgtctcgccagtctgtaagatgtcttgcaattgcaggattcattaagcgctttcgactgccccaccatggatctcaacgcgcccctcattgagaaaatgtccggaaacccgtggtttcaatcgctgcccatggccgagcgacaaaacctggtgggaaacagtacccaggtacgactcgccgttggcgagtcattgttccggcgcggcgatccgccggccggcttcttcggtatcgttgacggacgcttgaaggcgtcaagcgtccgcagtgacggcaaggaaggcatcctcgtcatcctcgagcaaggcaactggttcggacaaatgtccaccattaccgggtggccaagcgcttttgacgttaccgcggtcgaggccgctcttgtcctgaagctcagccctgaagcgttcaatgcatttatgcagaacgccgtgtttgcgagagccatcgccgtactgctgtgccagcacacgagcctgctctatcagatgctcgaagacgcgacgctccattccactcgtacaaggatcgcccgtcgtttgatgcgtcttgctcgtggtgacgcaactctggctgccgagcatcgggcgaaaatccctgtttcccaggatacgctcgccatgatgcttggcatttcgcgccagacacttgctcttgaactcaaggcgatggctgcgcaaggtgccgttgccttgcgctacgggcacgtcgagatcgtttccatggacgttctcatgtcgttcgacgactaggggcggtcgaaggcaaagcgcgatccacgccatgaagccgcgacatgactacgccggctgagaccagcagcgccgcaaggacatacaatccaattgaagtgcttcctgttgctgtcttcagcaagcccatcgaagctgggcaaagcactccggccaggcccgaaagggtcgttattgcggctatccctacagcggccacgttcttcggcaagacgctggtcgcaattgcccagaagaccgggaacgccgatacaacaccagcggtcgctgccgaaacaagggtcatcgacatccacaggctgcctgttgtacaagctgtcgcagcaagtccgagcgctgcaacgcaagtggcgatgacaaagctctgcctgtgactgcggcgcgcatccgaccgacgcgcgacccaaaacatggccagcatgccgatggagtacggaatgagcgagtagaaaccgacttcctgtacgttcgagaatccccagccatgaatcatctctggtagccagaagctgagcgtgtaggcgccacagctaatcgcgaagtacaggtatccaagcgcgaagaacgacggcagtcgccatatgccgcggatcccgccgcctccagatgccggcgtttgatgtggcacaagggccgtatgcgaagcaaccaattggcgttgcctttcactcagccacgtggcctgctccggctgatctgtcaggtagaagtaggcaataatgcctagcaaggaagccgggaggccctgcagcacaaacatccattgccatcccttcaggccccacaggctgttgaggttctggatgatccatcctgacagcggacctgcgatcatgcccgcggcaactccggctgccatgagcatggcgatgatcctggcgcgtcgctctggtgggtaccagaacgtaaggtagagcacgacgccgggaaagaatcctgcttcgaagacgccgagcaggaagcggacgatatagaactccatcggggttctgacaagcagcgttgcggtcgacgccaagccccagagcaacatgattcgcaagagggtcttgcgggcaccaatcctctgcatgacaagattgctcggtatctcgaacagcaggtagcccacatagaacatgctggccccgatgccatacactgcggcagaaaagcccagttcggacctcatctgcagttgcgcatatccgatgttgatacggtcgatatggtttagtacgcagcagatgaacagcaatggcatcaatcgaagcgtaatcccccggtaggtcaactcgatgtcgccgtccgcgactacctgctcgccggacgccaacgcgtcgccattcaattcgtgcactgcgtccgcctgcattcctgaaagaaccttcatccttatctccatccgccattgatcccgctcgatgcgatgatggtaggcaagcggaggcgtggggaatgccagaaaattgacaatcctcgggataacgaggtattgcggacatatcgccctaaggcatgacggctgtctggaaccgccagggcattaactcgcgccactaccggtgacaacactgggataagcccgtcattgcaagaattcttgcgacgatcgccggcaacctcggtgtctcgatcgacgaaggcacctgggtgatcacgctgttcgccgcggccaatgctgtcgcgatcccgctgaccggctggctcacgcagcggatcggacaggtccgcctgttcgtcggcgccatcctgctgttcgtgctgtcgtcctggcgatgcggcgtggcgcccaacctgaccacgctgctcgccgcggcctgttcgccgctgccgtgacctgggcgatctaccgcgaccgaaaaacgccgacgcgcaagctgtcgatcgacatggtaggcctggcatcgctggtcacctgggttgcgtcgctgcagatcatgctcgacaagggcaagaacctggactggttcagctcgcccgtcttcaccgtgctgatggccccggtggttggcaagatcctgccgaagtcggagttgcgcgtgctcgccaccctctccttcctgggattcgcggcggtgtacttcatgcgctcgcactacaccacgggcgtggatacctacacgcgacgcacgtcccgcagtcatgacagaacgcccgactaaagcgataaacttgagtggtcagaggacaataccgtgctcggccgtcggcgcggggatatcgcacttctcgcccagcatgtccatgagttcgtgttcgatcttccggcagatctgtgccatgggcacatcattggcgtttccttcgaacgggttctccgtgctttcgcccacttgctccagcgcgaggtacatccaggagatcatcgtgctgaatggaatgaccagccagatcatgttgccatgcatgacgcctgaaacgctggcattgagcttttcgaattccgtaataatgccaaaaggcagtagcagacaaaacgtacggacaaagagcttgttgacgaccgcatattgcctgggatacggatagtccttgatacgctccgcccgtccttgctgcgcgaagaagcctctgatcgatcccaccaactccagatagaaggcattgccgatctcgccagcgtcaaggagccgcctgatcgtcgccgactgcgttcccagcaaccggcttgtcttgctctcggcgtgcgcaagcgagtcgagttcggcctgtggcagataccgcgcaagcgcctcgtgcaatggcgtctcccactctggaacccggtagtacttccggtattccacgttggatgccttgcccgcgctttcccagatccttggggttctcagctggtagcggagcgccgtcagccacgcgcaatggcggagaaccagatcccgcccggccgcctgccctgccagaaagtcctggctcatcatacccagacaccggctgccggtcaggatctcagtccagatctgctgtgcctccagggccctgctgtaggtctgcacattccggaaacccacgatgaatgacgtggcggtgcccagcagcaccacaaccgcgaccggaatcgacagccatttcagcccgaagaactgataaaggactacgggcagcgaaccgcatgccagcgaggcataaagttgccgtctcgaccagaacgtgaactcggatattgtgtacgattttcccaggtgcatggtgcgcgtctcgcggcagtgcggcagttcgcggatccaaggtccgaactgccggcaggggcagcacggccaaccgcctcaccaccgaccagatcgctacccgggacctggttttgtcatggtgatattgccaagaaaccgacgtagtatcaatttccgtcccacaacccttcacgccaccccggaaaacagcggcacggcaagagcatgcggcagcgccgctcttgccgtgccggacagtgcgcaccggcattgccggtgcctgaagggacgacgactacttcaccggcgtcaggatcggcgcgccctttttcttgagcaggaacacgacaaactttgctggctgcgtcttgctggcattgcgtccgacggtgtggatatcgttgggaccttcgtggaaggtatcgcccggtttgagcgttacctcttttccgcccttgaggcccatgacgatgctgccctcgagcacgtagacgaaggcgtgggcgtcatggcgatgcacgggatcggcgctgcccggcggatactccacgatgatcatctcggcttccttccccggatattcgggcaacgcttccttgaccaggggcgtgacactcgcctccggcgcggcggcggccggctttgcaaccgtcaggcacgacaacacaagggctgccgcaacggaagtgaccgtcttcatggcatcactccaggttggccttgtcgagcccgaacgccttgtccgacgaaccaggcaccatgcggaacgccacgttcaggcgattccaggtattgatcgcccccaccaggaaggtgaggtccgacagttccttctcgctgtactgggtgcgcacgccctcatagatatcgtcgggcacgccgtcggcgggaagcctcgtcagcacctcggtccaggccagcgcggcgcgttcgcgcggcgagaacagcgtcgactcgcgccagatcgccacatgatgcaggcgcaattcgcgctcgccgtggatcttcgccatcttgatatgcatgtcgacgcagaacgcgcagccattgagctgcgacgcgcgaatctcgacgagctcgcgaatgggcacttcaatcgtggtcttctggaacagcgcgccgaactccatgagcttcttggacagttccggggattgctggaagtaattcgtacgttgggtcatgtttgctcctggtgatctgctcaatgtgatactgacgaacgcggtgctgcttgcgtgggcatgcgccctgcggcctatcgttgctgcgattgacgcagccattcctctaagccgatgcgcccgaggcgcgcctcgcccaacggcacgagcgaatgttcctcgacccggccgccgaagtagcgggcctcggggtcgcgcacgacttcacgcgggtcgccaaccgccttgagatagcgggcgacgatctcgttgaacggggctcgttccgggccggcgatctcgacgatgccgtttcgcggtggcgcgagcgccacatcggcaacgattgcggcaacgtcgtccgccgcaatcggctggaacagcccaggcgataggctgacgatatttccttgcgcactggaatcggcgatgccgccgatgaattccatgaactgggtcgagcggatgatggtgtaggggatgctggaggcctctatcagtttttcttgcgcgaccttggcacggaaatagccgttctcgggcgtccggtcggtgccgacgatggacagcgcgacatggtgctgaacgcccgccttggtctccgccgcatgaaggttgcggccggaggtctcgaagaactccagcaccgccttgtcttcaaacgacggggaattggcaaggtcgatcaccacctgagtgccggcgagggcctcctggagcccctcgccagtgatgctgttgacaccgctcctgggcgaggcggccacgacctcgtggccgccctggcgcaaaatggcgacggtcttcgagccgatcaggccggtcccgccaatgacgacaatcttcatgatgcttctccgtgctgaggaaggtggaacgattccatgttagggaacgcggcatccccgcgccagctcgactcggagcgccggctcgtggaatagtcacggcgcgggctgcaatcgagcagcagcagcaggttgaggagcttcattgcagctccatgcagaagtggaggcccttggcgagcaggccggaacggaaatagaagcgctgggccagcgctttcgcgagtgcggtatccaggacaagtcgctggcagccttctgtgcgtccaagctcgcaaagcgcttgcagcagacgctcgccgtgaccccgcccccggccttcggcatcggtgatcaggtcgtcgacgtacagaaagcgcccgtggatgaggttgtcaagacgccgatatccggccagcgcaacagctttgccatcgtcccagagcgcgagcagccggtacccttgtccgcgttgcagcatgacggcgtcgaggaagtcttccggcatttgcagcctggggcgcagttgccgcatgacagggaagcaggcacggatctcggcctccgtttccgcatgtctgagcgtcaggttcttggtcatggtgccgatgcgtgctggttgtgcaggcttcaatgtagttgagcgatgacacagtcaacaggcacatgtttatcgttttcaactaggccatcgacaaggacggtatgacctaagagtggtttgtcatgcgatcgaccaggcggcgaatgaagggcgtggccgacacgacgaccggcagcatggtcagccaggagacgctccaggaccttagccagtgctgaaagaaccggccctcttctgcaaatggaaggcttgcgatggcagcagcgatggagcaggtcaagccggcctggataacaccataggcgaaatagctgtagcgcgaaggaatcttgggcatgtgagtcgcctctatgcattctttgaaccagacattgatgcaccctgccattgccgcgccaggggctgtcgcccctggcgcaagaagggcgctacgcggctgcttcaacctttactgccaaccgctgcacggtttcgttggtatcccacagcgcgtttgcgatgaagcggaagttgaccagtgccgcgtgatatccgtccccttcaggtagcttcggccctgctacggcgtcgcgcacgacagcaacttcgaaaccttgctccagcagatcccgcagatgagattcgacgcacagattggcggccatgcccgcaaggatcacctggtcgacgcgctgcttgcgcaattgaaggacaaggtcgttggcctgcgggccgtacagcttgtgcgtggagcagatgatggtcttgccatcctcgatatacggcttgagctccggcacgaagtccgcgcccgagtcacggaatccgtccaggttcagcgcgcccggacggtcgaacatgccgatggcatgctggaacatttcggcggggccctgcactttccatgtgtgatcatggggaaagtaatagtggggagagatggcgaccgtgatgcccgcctgttttgctgcctcgaacagacggaccaggttggccacgaggttctgctccgtcacgctttctcccaccacgccccagctgcggccttcggggctcatgaagtcgatctgcgggtcgatcacgacgagcgcggtgcgggacaggtccagcgtaatgcaggacttcggcagagccggatcaacgggatctgcataggggctattgtggttgcacatgggaagtacctcttatggtgggcccagtctgccggcgccttcgtggggcccggcagatgcggcgtcgtttcaactacggatgaatgccaacaggtcggcgttgaatctgtctttgtgggtgtctgtgagcccatgcggcgcaccggggtagacgatcagcttcgcattcctgacgagctttgccgatgcgcgtccagcggcgtcgatcggcacgatctgatcgtcgtcgccgtggatgatcagggtcggcacatcgatcttcctgagatcctcggtgaagtcggtctcagaaaatgccttgatcgagtcgtacgtactcttgtgtccaccctgcatgccctgcgcccaccatgcgtcgatcaacccctgcgacggctttgcaccgggacggttgaagccatagaacggccccgccggcacgtccttgtagaactgcgaccgattggcaagttgtgcggcacgcaggccgtcgaatacttcgattggcagtccgcgcggattggcggcggtcttcaccatcaaaggcggcacggctgaaaccagcaccacctttgaaacgcgtcgcgcaccgtgccggccgatgtaccgggccacctcgccaccacccgtggagaagcccaccaggatggcgtcccgcaggtcaagggtttcgaacacaatggccaggtcgtcagcataagtgttcatctcgttgccattccatggctggcttgaacgaccgtggccacgacggtcatgtgcaacggcgcgatacccttccgacgcaacgagcatcatctgggattcccaactgtccgagctcagtggccagccatgactgaatacaacggggcgaccggcgccccagtccttgaaatagagctgggtgccgtcctttgccgtgatgtagccgcctgaagccttgccgcttgcctttgcggtggtcgacttttctgccgacggtgccgccgccgcaggtccgggcaagccggaagccaccagcgcgctggctgtggccgccccgcccaacaacaggttacgtcgcgataggccttgatcgaggctgcgatctgaagacatggtgagactcctctattggcgcgtgcgcgcgtttccttgaatatgtctgggcatcaggtccctggtcatggtgccggtgcgtgctggcttgtgcaggccccaatgtaaatggacgatgactcagtcaacaggcacatgtttattgttttcgactgggccatcgacatggggcggtatgaccgatggttggtagcgcgtcggcaggcgtcgccattgcgctcgaccttgctgcgcaggaccgccccttcccaggcttcgataatgatggacgcgagccgcgcggaatcaacggtcaagcgtcccctgacgatcgtctatgctttcagcgcgcgcatcagctcggcaaccaggcgatcggcttcagtctgactgcgcagattggtaaaacccatcatcaagccacgccgcccgggcgcaccctgccgccaggcggtcagcgaatggacggcgaatcctgcctcgcgcgcacgacgggccatcgccagatcgtcaagatcgtccctgacgtcgaccagaaggtgcatgccgccatcctgcaggcaaacagtgaagccgtccgttttgtatggagccagcgcctcggccagcattgcacgtcgtcgcgcgtaaagcgtgcgcatgcgtttgatgtgccgggcgaagtgcccctgcgcaataaactccgccgccacggcttgcaagagttcagggcagccgccatgcaccgtgcgcctgcaggccagatccattgtcggcaccagactctgtggcacgaccacgtaagcgagccgtagccccgggtacagcaccttgctaagcgtgccgcaatagatcacccggtcgcatgtatccaggctcttcaaggccggtaacgggtggccgcggtaacgaaactcgccgtcgtagtcgtcctcgatgatccatgcgccccgctcaccggcccagtcgagcagttcgacgcgacgttgcagtgtcagtgccacgccagtcgggctctggtgcgatggcgtcactacggccaggcgcgcctctggaaaatgctgacacccaaaatcgacgtcgaggccatgatcatccactggcacattccggacctgcaggttcaggcgcctgagtgactgggctgtcggcgggtagctgggatcctcaacccaggcgctttcgcccgccagcctgagcgcatccacaatcagcgcaaggctggccgtataggccggcacgacgaacacctggtgcggctgggcgtcgatgccccgtgagcgctgcaggtaagcggccaacgcttctcgcagcgggccaaatccggctgacgccggcctggtcagcgagccggcgctgcgtacttgccgcgccatcaacctcgtccatagtttccgcgggaactcatccagcgcgggaagccccagttgcaacggcgcggggattccaccctctgtttcgatagaaaactcggtaagttcctggttcggtggcgtgcggctggatccagccgctgcggccacgcggtgggggcgcgatggcgcaatttgctcggaaacaaacgtccccgcggggcctctggcgatcaggtagccttcgcccaggagccgctcataggcgacctgaacggtcccgcgcgctacgcctagctcgcccgcaaacgcacgcaaggatggcacccgctgcccgggtttcagttgcccttgccggatcgaggcacgaatccgtgcatagatctgctcatgcagcggcgcagcattggatgggtcctgagccggtgacttcgtcatagcctggcagacgtatccgggcagtgccgcaacgccgatgcatgggaaagcgaatcattgccggcggtggcaacggatcggatctggatgtgatcttgacctccgatcataccccagggcgcgcatccgccgggacccggcccgtgacggcctgagaaagcaaatgggcggagattcagagtctccgcgcattccccttccgccacaggcgccggcattggccggtgccatcgggctggcggactacaccggcaccgcctccccgcagcgggccatgccatgcatatagtgcgaaggcggcatggaatcgaccgtagcctggaccgcttccttgcacagggacggacgcttggccagcgcatccacatatcgcacgacgttgggcaggccttcccacatcgacgcaagccccagataagccatccggaccaggttgacaccccacagcacatcgccgagcgagaatgattcccccctgaggtacggtgacgacgaaccaagcgcatggtcgaggtccgccaagaggcccgcgacgtgccgacgtgcggcgcgctgaaatgccgcatcgtggcggaccgacttgccaccccgctccttcgcgatcttcgcgcgataggctgcaaccagctccgcatcgtcggcattggcgtcaatcatggcttcgagtgcctggatcttgtagtcgtagaccgtttccatggctgtcttgagcgcttcaggccgccggtcggcatcgggatgaaagccgtagagcaaggtgccgttcgggagctgatcgacgatgttcacctggtgcatcacccgggcacgcgcatcggcatcccccggcacgagatcaatgggatcgcgcgataccgcatcgagatagcagcagatccgtttggaatcggcaatgacgcggccagcctcgtagtccacaagcaacgggaccgtgcagggatcaaagccttcggtctccaccgaagtgcgcccgctatagccgctgacaaattcccgccccacttcccggcctgcaagcaaccgcagtcggacgtagggcggatggtagtgctcggccggaacaaggccatccggccccatcgaaccgaggatcatcatatcgttcgaacggtacggcaactgcttctcgaacagtaccgtgcgcactttctgcgagcagagcgaactggcggcgtggaacagttcgaagcgcgggttggcgtcacttcccacgagagagattcgcgccgggtccgcgatggcggcacgggcaccagccgccatattcgtcagtttgtcatggctcattgctggcttcctgggactcaggtttggcgctatcgttcatcgttgtctcctggttgttgggttgacgtctagcaactcattttgggcggtgcccgttcgcagcatcagctccatctgctgtgcaatctgcagcagcgcaccgtcgtcgccgggcttcgcgacgatctgcaaggccgcgggaaggctgcgttcgccggtcgccaggggaatcgagatggcaggaaatcccgcgacattgaacggcgccgtataggtcatcagcgcctcgcggacggtgccggtccaggcgccaatgctgacggtgccggcatcgagatgcggtgcggtgcacgggcatgtcggcagcacgagatagtcaaccgtcgacatcaccttgtgcagcctcgccgtgaaatctcgcctggcctgctgggccgctgcataggcgcgcaggtccatggtttcggcgcgtttcagccggtcgacggtttccgggttgtagtgcgtcgagatacggtcccagtcattgcggcggaaatgctcgatgccgccttcgatcaggacgatgctcgcgaaggcaccgaataccgcatcgaacaggccggaagtgctgacgttcacgcaggaaaagacttgcgccagccgcttcatcgcgccatcaaatggcaccgcaatctcaggactgagtggaaccggtgcaatgtcacgaatgacgcccagccttgcggacagccacgcatcgctctcgggaaccttgatgtcgacggcatcggcgagcaacagcacgtcgtcgacctgctcgccgagcaggccaacgtggtcgcaagtgggcgccagggggaacacgccgcgcgtggataacgtgccgagcgtgggcttgtatccgacgacgccgcacagtgcggcgggaatccggaccgagccgccggtatccgtgcccacgcccgccatgatggcaccgtgcgcaatcgccgccgcggcaccaccactggaacccccgggtatgcgtgtatggtccagcggattcagggtatcgccaaacctggcgctggcggttgtcacgccccacgcgaattcgtgggtcgtggtcttgcctatgatgatcgcgccgcgctccaccagagttttcacgatctccgcatcggcggctggcacatgaccgagataggctgcggaaccgtagcgggtctccatgcccttggtgtcgatcagatccttgaccgcaatgggcagcccttccagtggccgcggccggcgttcgccatagcggcgatcgctttccgcggccgccttcagggcacggtcccaatcgatcgccgagaatgcattgagcagccgcttgctggcttccgcgcgttcgagcgcctgctccgtcaatgccgtcgcggtgatctgccgcgtggcaagggcatccagcgcgctgcgcaagcccatggaatgcggggccgtcgttcgggatgggcgtcggatgccgtgctggtcgagcgacgcgacagccgtcggaagtatgtcgtggccagagaagatcgcgtcttgtggcaggcagttcagctgattcatgtatccattccagggtgacgttgcggttggcttatccctggttggaaacgatagtggatcggctcggccttggcagctggctggcgccgaacgcagcgtccatgaatatggaacgcccggcgggacacacgggacgtggcccgcgtggcattggaggcagaggaggtagtgccgggtcagcggccgtcgaatgcggtgaccttgggcagctctgcggcgaggaaatcgaccagcgaccgcaccgccggaagcagtccggtccgatagggcatgagggcggagatgcgcgcatccgcggcgatccagcccggcaggacttgccgcagcacgccagcctgcagctcgggccggcagatatacccgggcagggctgccacgccaacgttggcgcaggctgcctccttcagggacatcatgctgttgctctggaagcgtggctcgaccgggatggtgacgagcctgtcgtcgggcccgcgcagttgccattgcagcggccctttgcgcaccatcgagacgatggcatgggatgcaagttgctccggtgcatccaggagtggcatccgttcgaggtagtcggcacccgcaaacaggtaccatggcgccctgacaatgggccgttggaccaggttggaatcctgcagcgccgaggtatgtccgcgcagcgccaggtcgaagccctcgccgacaacgtcgacgagcctgtccgtggcgatttccacgatgctgaccttgggatggctgctcaggaaggtcggcaggacctggcgcagcgcaaactgcgcaagctcgaccgctaccgtcacgcggataatcccgctgggttccgcgagcctctggcgcatcgcctgttccgcgacgtcggcgctctgcagcaaggcgacagcgtactggtagaactctgagcctacgtcggtcaaggcaaactggcgcgaggtccggttaatcaggcgaacccccagcgaagcctccagttccttgaccctgtgacttaacgtggacttgggcagccccaggctgttgccggcagacgtaaagccaccgcggtcgaccacttgcacgaagtgaaaaacgtctttcagatccagcatttggctgccttggtagcggttgggttggccaatggtgtgtgcctgccatcgcatggtactgcaaggggggtgcgcagtgccacggtcgggcgccccaatgaccgccgttgccgtggccggcgcccgctcgcgccacaaccgtcaatgcgcggtgcgccacctcggccggttcgggcagtcgatcaaagagggaagcacagttcaacccagaacttgttgcctcgcggccgattctgcacttcgaactcgcgctgatacttgaacacaatgccggccgccggcgaccacatgtatcgtagttgcggcccgactgcgaccgctttcccgcgaaacccattccctgggacgggcgtgccgttgactttgtcatcggtgaactgcttcagcagatatccctgaagtccgagctggaacttgctgttcagcgaatagccaagcagatactcaagtgcggcaaccgcgccagagtgatatcgagttgctgaattccgtgaactgatctctacgagcgtggtggtagagacttcaactgcgggcgtgggaaaccatgtcgtgctgagttgcggcgttagcgcatatacattccggccggtgttcgccactcggttcgctgagtaggacccgctcggcactgcaatttcggtggtgaggtaggcgaagaatgatcgcgatggatttgaataaccgatgtacagcggctcaacgatgatgtctccaattccattgcgcttgccgctgccgcctggcgtgtccgcccgaatatgaacgagcgggatgattacaccactagacagagtaaaggggccgaatgtagtgccccatgtgtgaacgatacgcggggcgtcaataaacgcgttcaactggaacccgggcaggagactttctccatgcgggccagcgaactttccggcatggtagtagagcgtgtaattgtaaaactgggtttcaccaggcggtggcaaaattccattcaatacggtattgacgccaacagggtaactggtctgaccattctcggttgcctcgacgttggaggccagcaagcaagcgagcgcaaccaccgcagaaaccttcgcgggcactttaatcatgtctcctccgtctctgtattctatttttcggctgagggctcggggcatccgcatcagccggtgaagcgcgcctgccttaacgattcgacttctccgcaatttgccgagactcgctaacgctggctatcggcttcttcgcgcttttccaggtcagggagcggcttggacggttccgcgtgtcaccggtcgacgaacgagacgaactcgtccagttccagcttgcgcagctccatgttgttttccggaaaactgttgtctgcatagccgagtgacattccggccacgatcatctccccgtcgggaatggcgaggccttcacgaagcaccgccgattgcagcgaccagatctgctgcgggcaggtgtccaggccccgtgcgcgcgcggccagcatgatgttctgaaggaagcagccgtagcagatgaagctggcccattccaggcgccggtccatggtgaagatcagtcccactggcgcatcgaagaaccggaactgccgttcgacgtcgcgccggcgcccgacgatatcgctcctgtgcacgccctgcgcatcgcccagcatcccacgaaacgtattgaagcgcgacgagaatggcgccggcaattcctttggaaaaaacgggtagtcgggcgccagtccctcaggatcggcgcgatacgcctcgaccgcggctcccgcaatcttctcgcgcgcctttccggtcagcacatagcagcgccagggctgcgtgttgctcgaactcggcgcgtatttcgcgaccgacaggatgtccctgacagtctcgatcggcaccggctggtcaaggaagccgcgcttgctgcggcgtccgcgaatcagcgcttcggtcatctggattgcctccatcttcatgtctccgttctcgtggtgggggtcgccacggtggaaaggatcatagacacgtcccctgccttgtgaagacggcaaaacttgaaagcttcgtccggaaacaacgaacgacaggccccattcgcgcatgtgcggcgtccaaaatcctgaacgctccgttctcaaatcccgcgcgcacgcgcgaacccgattcgcctatcttcctactcgggatcggagcccccgatcgcatacgaaaacatggtggagaagtggaatgaaccagttgaagtgcttgccgcaggaagagattgtctggggacacgacgtgctgagaaccgttgccccctccatggggaactacggcatccgccgtccgatgacgttcaccgtggaattccttgaggccttgaaccgcgagcacctgcggcctgccatcgccgacggcgtgggcacctttaccggcctgccgccgcatgtgcccgatttcgccgtacgcgacggactgcgtgcatgcatcgaggccaatgcgggatcgatcatcgccctcggcggcggctctgtactcgatgccgcaaaggcagtctcctaccagcatttccagcagaccggccgctacctgcccattgccgcgattccgacgaccctgtcgggttcggagttttcccactacttcggcgtgacggaaacggtcggtccccagaagttcaagcgcagttatgccgtgcgcgaaacgacccccaggctggtggtgatcgatccccggatgattgtcgacacgccacgtatgctgctactgagttcggccatcaaggggatcgaccatgcggtggaaggcatgcgccgggtcgacgtggatcacccgcacgccatcctcgccgccaggggcgtggagcgcttccttgccgtgctggagaagtggccgcgcaaactcgaaacgcgcgaggccatcgcgggcggccacgtgtcgaccgacgacctgctgcagcttcagctcgctgcgtggcagtgttatttctatcctgcttcggtcatctacggcctgagccatcggatcgggcacatcctcggcgggacgttcggagtaccgcacagcgtgacgtcgtgcattgcgctggctcccgtcatccgcgcctgcgccgacgcctatggccgaaagcttgagattttctccacggaccgtggcagccgcacgcccgccgcattcctcgctggccgcattgaggcagccgtggacgcactggacttgccgagccggctcggcgatgtcgatttcgatagggcgaagctccccgagatggcggtcctgctcaagcagaactatccctccgaggtcggcgaccttggcgaggatgccggcacgaagctggatgcgctgttggagagcctgtggtaatgaccgcccagccatccgatgctgcgcatcgtcgccgttccacaaaacttgcctgaccccaccaccacgaggagaccaaagtgaacgataccgtcaagcccgcatccccgtcgccggccgggcatacgccatacagtgactggttacaaacagacgtgctccactcgctgcagcacccggtcagcgatcatcccggcgagcacgcctggatcgtatcggcgcaggtgtccgagctctactggatgctgatcatcaaggaaatacaggccgcgcaggcgcaattgcgtgccgatgacctgaccggggcctgccggacgctgcggcgcgtcgtcgcccaccacgagccgctcaatgccacatggcgctctatcgcgtggatgacgccggtcgacctgctggccatcctgtcctgcgttggcccaaagttcggcaaggacaccgccctccagggctggacgtaccggcagatggtctacctgctcggcatcaagcaaggggagcacctgcagcacttcctgccgcaaccccggcgctgggaacaactcagcaaggcgctggcggagccgagcctgtatgacgaggtgctcgcccacctgggccgcaagggcttcgccgtgccggcggtggtactcgaacgcgatttcagtgtgccctacacgccggaccaggcggtagagaatgtctggcgcgaggtctacgccgacccggacgagcaccgtgaactgcagcagctcggcgagacgctggccgatatcgcggaggggttctccgcttggaagcacctgcacctgatggcaacgcgccggacgttcggcgcccggccggcctacttcggcaccgagggcattgcgtggctcctgccgaccatgaacgagatcccgttcccggaactctggtctgcgcgcggcttcatcggcgatccgcccgcggtgtgtccgcacgcccgcggacagagaaacgcccaggctgcggagtgacgcgctcaagacggtcatggaagcggtctgcggtcacaagatcgcggcgctcgagtccatgatcgtcaagcaagctgcgtggagactgcgccagcctgagcggatgctatcgtgtcagcggcctgtgccgatgcaaaaagggcggagacagcgagtccccgctcttttttactatcgggctattactttcaggctgccacgggctgcggctgggcgtgcaaggcgcgagcgacggtcgtcaccctgcggccctggaaccgggcaaccgccaggtgatcgtcgtcgggcttcacggcgtcacgctgcgagacgtgagtcgcgccgtacggggtgccggccttgaacatcgccgcgtcggcatagcccagcggcacgatgatcaggcccaggtgcgccatgggcgcgtaggtcgccagcagcgtggcttcattgccgccgtggcgcgaggacgtcgagccgaagaccgagcccaccttgtcattcagttttcccgcgaaccagaggccgccgagcccgtcgatatacgccttgagttcggccgaaatcgacccgaaccgcgtcggcgtgccgaacacgatggcgtcagcccactcggcatcggcttcggtcggcgcctcatatttcgcgttcatctccgtggcgttctcgagccagcccggcgcctgccgcatgacgtcggggccgacaacctcccgcacacgccgcatgcggacttctgcgccagcttcgagggccccctcggcgacagccttggccagcatctcggtggagctgtttcgtgagtagaaaacaatcagtactttcggtttttgcatggtgatctccggcaacgtcatacagagatgggctcgagccggcccagcagctcgtccttgcgatccgccagccacggcgggagctggaactcctcgccaaaatggccgggctcttcatcgatcgcgaagccgatgtcggtggtggtcgcctcgaacatcacgccgccgggcatcttgaagtacatcgagcggaagtagttgcggtgcaccgattcggacgtatcgatgtagcccagggcaaacattctctccttcaggatcgcctgctgctccacgttatccaccgcgaaggccacatggtggaccgtgccttcgccgtagatcgacgaaccctggtgccggtccggctcatgcaggaactcgacgatcgtccccgggccgccggtgtacgtctcgaagcggtagtaggatcccgcctggcctgcgttccggaacccgatcgcttcgctcatgaagcggatcgattcggcgacttcccgcagcgacagcgtgatgctgtggacgccgcggatggcatgggcttcggggatatcgctggccacgcaagccgggcgcgagtcgagatccgtttcgacgagatcgaactcgatgccgcacggatgctggagtcgctggcggcgctctccgaagcgctcgacgatctcgctgtcatacggcacgtccatggcatcgaagcggctgcgccagaattcgagcgagcccttgggaaccgagtagttgatgacccgcacctggcccgatcccggacgcgccatgacgccccgctgacggaacgggaacgacgtcaccagggtccctggatcgccattcgcgttgccataataaaggtggtagatggggtcctcgccgtcaaggagcacggtcttcttcacgaggctctgcccgagcagcttgacgtagaagtccacatcctcctgtgcgtgcctcacgccgagggtcaaatgatggaatcccttgagcattaacattgtcctctccagtttgaaatagacatgtagaaacagcgcatagccgctcctgtgcaacagcttatgacggcagataccgattgggcagccgtcacgggttgtacgcagggttcggcaaacttggacaatgccgccctgtgaggggcggtgcgcgatggcgcaggagcgggctgcagtgaagggcggacgcactcaatgccgccaaagcagatgtcgagcggagatcgaggaagatcggggagacagcgcagaaggcttttgcccacaatgacgccgagagcgaacgtcagcccgaaaattgaattacgccgcccgtggactttcccccccgcaggtttcccgtcctccgcgcggccggcgtacatgcggttggttcggggttaagactgtgcaatcttcggacggccgttctgtagcgtagcgcggccgttgccttatcaaggtccaatggcggagaactgtaggtagttgcctctggcgcccgcgcacccacgcgcgggtgggcctacgcctgattccggccattttgagattctcgccaccgcccgcctcacccacgccgcgtgccgcgggactatcgcgcctcggtcgattcgcgctcgaactcgcggatcaccgggttgccaaggatggcatccctccccgcctcgatcaggcgatcgacgtccctctcgggcagactaagtctggtcggcacatcgctcagacttgcagcacgctccttgtcgagggcttcaaacgagatccgcgtgacgaagaattcgacttcgttgcaccgccatcctgggcggcgtgcagcgatctcctgctgccgggaatgcggcatgccccatgccttgcgaagcgccggtgataacaatgaccttttgttggttgctcatgctacacctcctccagttgtgggttgatgcggtgcagtcccgggctcaaaacctccgaaccgctcagtaagcgtcggcgcggctatgcgcggttatcgtcgccgacagattttcctgttcaacgatgggacgagcgtatatatgtggtacgcgttggttccgaattagtccagtggcgcggcctgtcgacggatacttttgaaggtgcgagcattcggaagacattcattaagccttcacaaacgtccgacgcaggagtccggatcgcttcgtttgatcgcctgtaccgcacagcggcgtgtgccctgcagtgaacagccttcgacgccatgctcacctcgcgcatatccagggacgtgtaccaatcaccggtagcgagagacaatacgggcgcccagagcctgccccgaggggctcaggccgcttcccgagcgacagcgagatagccgtggatctgcgacacaaccgctgcgccctcgcccaccgcagtggccacgcgcttggtcgagccggagcggacatcgccgatggcgaagacgcccgacacgcaggtttccagcgtattggactgcagcccggcgtctatgccggtcagtacgaaccccttggcatctacccccacatcgcagccgtccagccacgacgtgttcggctgcgcgccggtaaacaggaacacgtgctgcacccgcatcgtcatctgcgtgcccatattgcaatcacgcagggttacgcctgtcagccgcgtattgccttcgaggtccaccacttcggtgcgggcatgcaccgtgatgttgcgctgcgcggcgatgcggtcgatcaggtagcgcgacatgctggtgtcgaggctatcgccgcgaatcacaacgtggacgtgcgccacatgggcgcccaggaacacggcggcctggccggcggaattgccgccacccaccagcatgacttcccgcttggcgcagagcttggcttccaccggcgacgcccagtagtagacgccactcccttcaaactcggcccggcgcggaatcggcggccgacggtacgcggcgccgctggcgatgatgacggtacgtgcctggatcgtatcgccggcccgcgtacgcaactcgtgtacggcgccgcaatcgagccgttcgatttccgtgggaaaggcgatgtgcgcgccgaacttctgcgcctgcgcatatgcattggtggtaagggcatggcccgaaattccggcgggaaatcccaggtagttctcgatgcgcgcgctggcaccagcctgaccgccgggcgacaacgcatcgagcacgatcacgcgcaacccttccgacgccgcatagaccgccgccgccagcccggccggacccgcgccgatgatcgccacatcatagatccggctgccatcgatatgcggcagcaaccccaggcacgacagcacctgcgtggtatcgggacggcgcagcaccgtgccattggggtcgatgacgagcgggagatcgtcatcggtggcatcgaacttgccgggcatttccgccgcttcagcatcggcgtcgatatcaaccaccgagtacggatagttgttacgccgcaggagcgcctgcaggtcgaacatggccggatcgctcccacggccgatcagcgtcggcccgcgtccacgctggatcagcgccgtgcggcgcagcatcatcgcctgcatgaccagctcgccgagcgcggcctcggccaccatcagcgcgcgcaagcacgccgggcgcacgacgatggcgcgcacatcgtcgatggcgatgccgtcgacgagttcgggcgtgccagaaagctggccgatctcggccagaaaattgccgggcccgtgctcggaggccagagcgctgtcaccgatgccatcgcgctgcacaatgcgcacgcgcccttcgatgacgaggatcatgccattggccggatccccggtacgcaccacgtactcgccggcctgccaggtctgttcccggccatagggcgcgatgcgcgcgatatcggcggcagataagtgcggatacatctgccgctcgtgcaagactacgacggccggggccgcttccggcacggcgccggatgcatcggcggacgactcgtgttgggcggagatgtccatggcggatggaagtggtggtctgccttgcgtgcaagcgtagcagtgcagtcctcgaaacgcagtcatgcaccgggcgtgccatgacaagacttgcgtataggaggcgcgtcggaacggaggggcgaagcatcgctagccgcatgcggcaaacgcggcgatcgccttctagacgtcactcgagattggccttgtcgagcccgaacgccttgtccgacgaaccaggcaccatgcgaatgggctcttcaatcgtggtcttctggaacagcgcgccgaactccatgagcttcttggtcagttcggaggactgctggaagtagttaaggcgttgcatcatgattctctgctggcagttgaccaaaagttgagctcaccgaggctgcgcggcgttatttgcctcggggtcggcttggacgaaataatacgcttcgacagaccacgcggtagtgctttcacggtacccactctgttgtcgcatcggcaccaatcgcagcgttttttatggtgcaacattcgcgcaacggtccttgtgccgcgcgagtgcgccaacaacgcatctccgcaacagaaggattcgtagtcgttgggcgaggcctgcagagtcgaatggttagggggatccggaatagtctccattgcacgctggccgcaagtcgcccggttcaagtttgtacccggcctttttccggcttccgccatggcttgcagggaaacgtccgcctcagcccgatcagaagggaaaaatatgcctggataccaattagcgtgcactattcagtaaatggtaatcggccaagggaatatgccgacccctcgtcacgataggacttgttggtcccatgcacttcgtacatggctatcacgccgcagcatccccaattcggcccgcgccgtggcaacaaggtaatccagccgggatcatgggtgacgagcatcagcgcgcatccgcgctcttgcgtggcgtcgatggacggactcgaccttgcctaattgcgacgccttcgctcggctcaatgactgacgtgagattgagaagcgactcatccatgggtctgcatgatcgcagcaccggccgcaccaggcggcacgccgctggccagggaaggccttcgcggtctcatccatgctatctgtgcggccgttcgagggcaggctctgctcggcccggtatgcgccatcggcgatggagcaatcgtgccatagtcattcgggcaatccggccagccgcagcccctccgaaaactgggtcaggtcttctgggcgacggatcggaagccagtccttgagattggagacgcggagtgacggatcgagcctgcgcaggcgctgcatcgcctccttcgccttgtccatgcggccagcgagcgcatgactcgccgccagaatgccgaccggggcaaggaaactcggtagattgcatttggccctttcggcccaatccgaagcggcgtcgaagcgtcccgcgaagaaatgtgccagcgccatcccagcctgcatcctgaacatttccggatccaatggactcaagcgaacggcacgcgccaaatacttaatcgcagcgtctgtttcgccgcgacaagcgtgcaggcacccacacagggaccatgcaggtgcgtggttcggattaagcagcaaagctctatcgaacagcgcgataccgccgtcgaggtcgcccgtcagatgcccgagtgcatgagctcctctcgtgagcgccacagcatcgtcccggccgagctccaccgccagtcgcgccaggcgagtgccctcggcaatctccccgggctgatcggtcatccagccattcatcttgcgccagatataacaccaggacgccatgccataggccgacgcgaaatccggatcgagctcggtggccttgtagaacaagggcagcgccgcctcgattgattcgcgcgtcccgctgtgcacctgcgcggtgccgcgaaggtaatagtcataggcgcacaggttctccgtcggcttgcgcttggcacgctcgatttccgcccgttcaagctgcggcgcgatggcgccgaccacgctttccgcaacctggtcctgcagttcgaagatgtcgtccagcgtgccttcgaagcgttcagaccagagatgtgtcccggtcctggcatcgatgagctgcccggtgatgcgcaccttgttgccggtcttgcgcatgctgccttccagcacgtagcgcacgccaagctcgcgaccaacgtccttcacctcgactgcgcggcccttgtatgtgaagcttgagtcgctcgcgatgacgaacagccagcgtatgcgcgacaacgcagagatgatgtcctccaccacgccgtcggcgaaatactcctgctcgggatcgccgctcaagttctggaagggcaatacggtaatggagggcttacccgggaggaagagagccgacggcggctccctcgattctccggagatgtgttcgccgatctcgccgacgaagcggaaacccttgcgggcgacagtcctgaccaggcgctgttctccgccggtgtcgccaatggccttgcgaaccgcattgatgtgactggtgatcgtcgattccgatacgattcggccgcaccataccgccttcagcaggtcgtccttgctgacgacacggtcgcggttcctgacgagatgcagcagcagatcaaagacctgcggcccgacaggtacggctttcgcgcgatgcgaaagctcccggcgttccgggtcgatcacgtagtctccaaacacgaactgcacttgacatcccctggccgattcggctccccggtgggggcaactggcgaattccgtccatggatgatactgcaacccgtggtgagagcatctcattccgatcgggcaacgcttggacgaagaaccaagctctcctgcagagaaattcaaggtgaaggcaaggacctctccggagcgcgcgggcaatctccacgcacatcgactgcaacgggttgcggtcgagaaacggagagaaaacatgaagattgtcgtcatcgggtgcaccggcctcatcggaacaaagcttgtgcaggaccttcgcaagcgcggccatgacgtgctcgcacccgcccccgacaccggcgtcagcaccatcacccgcgagggtttggccaaagcgctcgacggcgccgaggtcgtcgtcgatgtggcgaatgcgccagtatggggagacgagacggccctcgagtttctcgagcgatcgggccgcaacctcctggctgcgggcgctgccgccggcgtacgccaccatgtggccctgtcgatcgttggtagcgaacggcttcccgactgcggctatttccgggcgaaggtcgcgcaggagagcctcatcaaggcgtccggcattccctacaccatcgtgcgtgcgacgcagttctacgagtttgtcggcgacattgcccagtcggctgccccgttggacaccttaggcaaggagattcgcttgtcgccggcgctgatccagccgatcgcgtcagcggacgtggcagcggcgctcgccgaggttgcagtcgcgccgccagtcaacggcacggtcgaagtcgccggtccggaggcgatgccgctggacgaactggtcaggcgcttcctgcgggcgacgcaggatacgcgcaaggtcgtgccggacgtccacgcgcgctactttggtggcctcctctccgatcggacgctcacacccggggagaacccccgcatcggcgcgatccggttcgaggactggctcggtcgctaccaggctaagtcctgcttcgccatgcagtcccctcttttggcgactgccggcgcggacaactcggaggcgcttgcatcgagcttcgcgacaagctatcccggagtcgtcgccttcatcaccgtcgtggccgaaggcggcttttccaaggccgctgaccggctcgggatcactcgttccgcggtcagccgctgcatccagaagctggaggcgcaggtcggcttgcgtctgctgagtcggacgacgcgcagcatttcgctcacgcgcgaaggcgagatccttcatgcccgctgccagcccagcgtcgctctcatcacggaggcgatggaggacctgcgcgatctgcgcgacggtccgccgcgaggacgcctgcgggtctccgcttccgtgggtttcggccgcaaggtggttgcaccgctgctgtgggccttccaggaaaagtaccccgacatcgagatcgagctgcacctgggctgcgtcgcgagcgacttcacgtcggaccgcatcgacgtctcgtttctcaacggacgcctggccgactcccggatcgtcgcgaaacggatcgtcccgatgcagactttggtgtgcgcctcgcccgcgtatgcggtaaggcgcggtatgcccgagtcgccggacgcgttgatgctgcacgactgcatcaacgtccgtctgccgtcgggccgcgtctacgaatgggagttcaaggtggaggggggattgcgaaagctgacgccgccatcgcgcatcatgttcaacgatgacgggctcgtgctggaggccgtcctccaaggcaaaggcatcgctcagttgggcgggtacctgatctgcgatctgctgcgcgaggggaaactggttcactccatgccacagtacgcacccgatgaccagggccactacatctgctacctgagccgtcagcacctgccgtcgcgtatccgcgtgttcgtcgaccacatgacggcagcgatccgggcgctggaccttcaatgcgcgggtgctttctcaccaacgcctgatgatcgacaggtcgccttggcgccaatggtgcccctgcggggtcaatagacttggcaagacgaacgagagtcgaccccactcttcgctggactgggccacccccaccgaattcgcctgccgatgcggcctgcatggcacatcggtgatcccaggagggcgaggcaatcacaggtcaccgcgcagtgggcttcgcgagctgggcgacgacctcgtcggtcgtccacagcgcgttggcaatgtagcggaagttgatcagcgcgctgagattgccgtcgccctcaggcagcttgggggccgcgaccgcatcacgcacgatggccacctcgaagccttgctccgcaaactcgcgcaagtgggactccacgcacaggttggccagcatcccggcgaggacgatcttggtgaccccctgcttgcgaagctggaacgcgagatcgttggtctgcgggctgtagagcttgtggggcgaagcgacgatcgtcttgccgtcctcgatgtagcgcttgaactcgggcatgaagtccgcgcccgagccgcggaacccatccaggctcagtgcgccgggtctgtcgaagatcttgatcttgtgctggaagagctcggcgggggcctggaacttccatcggtggtcgtgcgggtagtagtagtgaggcgagatcgcgacgacgatgcccgccttcttcgaggactcgaacaggcgcagcaggttcggcacgagccgttgctcggtgacggcttcaccaacagcggaccaagcggctcccttcgggctcatgaagtcgatctggggatcgatcacgaccagggcggtgcgttccagatcgagtgtcatcgtgggaacgggcatggcgcgttcggtcggatcggtgtactgcgccggttgtaccggatgtggatgtgccgtggcggttgcgatgcttgcaacggccattgcaagcgcggccgtcaaccgaagcgtggcgcgagcaacgcatcggtggtcacgattcttgaaaggctccgtcgactgctgttggtagttactgcgttgggtcatgttggttcctcggactggggtggacaacgaacacgccgcgagggtctcgatccgatgcatcgatgctgacgtgatgcgttgaaatctagaagcaaatgcccgcctgcactaggggctgggtgtggacaaatctgttgatcgcgaagtaccaatcgcgctcagcgagagtccgtcatgaatgagccggagcatttgaagatcctgtcgcgcggatggctgagcccggtgaacgacccagcggcacgcgccggatgcgctgccgcgacattggtgaagatccggcaacatcgaattgcccgtgatgcatatcgcatggcgaggagaccatggctagactgatcgcgtctccactcagatccatacccatgaaaattgatcccgcgccaacacggcctggcttcgctcgagtcacgcgccgtcagttgttggtcatcggggcaggcactgcagcagcagcggctttgccattcgcagcgtccgctgctcctactgcgccgaatggcgctaaaactccggaaggaaatccacccatgagctatgtcaccaccaaagacggggtccagatcttctacaaggatttgggtccctccaatggcaccccgatcgtcttctcgcacggatggcctctgagctccgacgattgggacgcgcagatgatgttcttcctctccaagggctatcgcgtcgtcgcgcacgatcggcgcgggcatggccgctcggcgcaagtctggaacggccacgacatggatcactacgccgacgacctcgccgcggtcgtgaaccatctcgacctcaagggcgcgatccacatcggccactccaccggcggcggcgaggtcgtgcgctatctggctcgccacggcgagaagcgggccgcgaaggcctgcctcattaacgccgtgcccccgctgatggtcaagaccgcgtcgaatcccggcggcctgccgaaggacgtgttcgacggcctgcaactgcagacggccacgaaccgggcgcagttctaccgcgatattcccgccgggccgttctacgggttcaaccggccgggcgtgaagccgcaggaaggcatcatccagaactggtggcgccaagggatgatgggcagcgccaaggcgcactacgacggcgtcgtcgcgttctcccagaccgacttcaccgacgacctgaagaagatcggactgccggtgctggtgatgcacggcgacgacgaccagatcgtcccctacgccgattccgcgccgctgtcggtcaagctgctgaagaacggcacgttgaagacctacaagggcttcccgcacggcatgccaacaacgcacgcgaacctcatcaacgcggacctgctggcttttatcaaggcctgattgcgtcgaatcagtccgcaccgtcgatggccggtccaccgttaagtgggggccatcgacgcgactcccactctgcacgtccagtcctccctcctgaagaggctccgctgaatccctctttttgcccacattgccatgaccaaactgactcatgccaacggcgcccccgttgtcgacaacttcaacatcgagaccgccggtgcgcgcggccccgcgctgctgcaggacatctggctgctcgagaagctcgcccacttcgaccgcgaggtgatccccgagcggcgcatgcacgccaagggctccggcgctttcggccacttcacggtgacgcacgacatcacggcgtactcgaaggccaggctcttttccggcgtcggcaagaagacggacgtcttcgtgcgcttctccacggtggccggcgagcgaggcgcggcggatgccgagcgagacatccgcggcttcgcggtgaagttctataccgaggaaggaaattgggacctggtgggcaacaacacgcccgtgttcttcctgcgtgacccgctgcgatttcccgacctgaaccacgcagtcaagcgcgacccgcgcagcaacctgcgcaacgcccagaacaactgggacttctggacgctgctacccgaggcgctgcaccaggtgaccatcgtgatgagcgatcgcggcctgcccgatggctatcgccacatgcacggtttcggcagccacacgttcagccttatcaacgcggacaacgagcggcgctgggtgaagtttcacctgcgcagccggcaaggcatccgtaacctcaccgacgcacaggacgccgcgatcgtcgccaacgaccgcgagagcgcgcagcgcgacctgctcgaggcgatcgacggcggcgacttcccgcgctggacgttgtgcatccaggtgatgagcgagcagcaggcgcaggtctgcccgttcaatcccttcgacctcaccaaggtctggccgcacggcgactatccgctaatcgaggtgggtgtgctggagctcaaccgcaaccccgacaactacttcgccgatgtggagcaggcagcgttctcgcccgccaacatcgtgccgggcattggcttctcgccggacaagatgctgcaggggcggctcttcagctacggcgatgcggtccgctaccggctgggcgtgaacgcgcaccagatcccggtgaacgccccgcgctgcccggtgcacagctatcatcgcgacggcgcgatgcgcgtggacggcaaccagggcgggctgcccggcatcgtgcccaacagccgcggcgagtgggccgacagcccgcggctggcggagccgccactggcgctctcgggcgcagccgcgcactgggaccatcgcgcggacgaggactactactcgcagccgggggcgctgttccgactaatgtcgcccgagcagaagctgcagctcttcgacaacacggcacgctcgctcggcggcgcgagcgaggacgtgcagcaacgacatatccgaaattgcacgatggccgatcgcgcctacggcgcaggggttgccgaggcactgaagaaccgctagtcagagaccgggcgcgttggtgcagcaagttgcccaacgcgccgtgaaaggaggggcggagttcgtacgctaatgcgcatcgggaggaaggcctggacgaccgctgtagcctggaagccgccatctgcccatccgatcatcggaaggcagagatgggtcggtcagagacggtcacgctttggcggcgggcatccgatcaagcaggcggtgatggccggcatgggcatcagcctgttgtcgctgcacacgctgtcgctggaactgcacaccggcgagatcgcgctgctggacgtgaccggcacgccgatcgagcgcatctggcatgtcgcgcatatgtccagcaagcgtttgtcaccggccagcgagagctgccgcgcctatctgctggagcacacggcggagtttttggggaaggaatatggcgggctgatgcctgggcggcgcgtggcttgaggtaccgggagggttcgcctcagtgcgacatgaagacaggcaagcctgactgccgcagcagggcgcgggtggtgccgcccagcaccagctccctcaaccgggagcggccatagccgccggcgaccagcaggccggcctgaaccttggccgcaagctgtggcagaacgtggtcgggatcgccctctccgaccagcagactggcgcggatgccatggctgagcagccatgctgtcagccgatcggcgctgtcacgataggcctctttctcaccagcagcgctgtacttgccagcgctgaccaccaggacggtaacggcgctggcatgcacaagccacggcagtgcgtccgcgaccgcgcgcgcggcctcccggccgccgttccatgcgatggcgacatggccgccaagtcgcgggccggacccgcccggcaccagcaggatgggccggcctgcattgagcattgcgtactccgcgaccccggccagcaaagccggcacatcggcctgtgccgagggcgctgagggcaggatgagatcggcgaagcggccctcgtcggcaagcgcccagccagactcggcttcgacaacgatgtgccgggtgggaatggccggcgacacttgcccggtcagcgtttcgagtgcgttcctgtgagccgcagccagcttgtgcaaatggttcgcggcaagcacgccgtattgcccggcttcttcgcccgccccgcgaaacggctccaggtgcgttcctgttgccgtcagtccgaccacgctgccgccggacttttcggcaagccgtgctgccgtttcaatgcgcgcggaccgtgcagcatcttcgctcaggtcgacaaggaaggttctgaagtccatgacgtgattccactctttggtttgaccttgcatcatcgtgaaaacagcaccggtgccgtcatcgagtcaagcagcgtacgcgtgacaccgccgagcaccagttcccgcatgcgaccgtgtccgtaggcacccatcacgatcaggtcggcatcgaaatccgccgcgcgcgaaaggatgagttcgccgatggtcaggtcagccccaccgggaccgtgttcgatttccacggcgacgccgtggcgctccagcacgcgtgcggcgtggccgaccggggtggcgtcggctctggcctccttggccgcggtctgtgcgcaaaaaatgcgcgcctgcgcgccggccatcagcggcacggcgtcgtgaagcgcccgcgccgcctcgcggctgccattccacgccacgatcacgcgcgtacccagcgatggaaacgtgcccgcgcacggcaccacgagcgtcggtcggccggtctccagcagcagcgattccagcagttgccgggccaccggaccttccgtattgccggggtcgtactggccggcaacgaccaggccggcctcgcgggcctcgcgcagcactgatgccaccgccccctgctccgcggcgcgccactccgcgcgcaccggcatggcctgggttgcagccagaaactgcgcgcggacgtcttccctgacctgcttgcgccgggccagatcgtccgcgacatattgctgcgcgccgtccatgaggtagaaccaggcaggatcgggaatgaaacctgcgtacatgccgatcagccggcactggctggccgccgcaagtcgccccgccacttcgagccgctgccgtgcctgcggactgctgtccagatgcaccaggatgctgtcgtaagccatgatcgccctccccctcaactacagaccagtctaggcagcaaggccgaccggcgcttgacccggatcaacgggccagccatgcggcgacatggctcaagttcgtcctgatgtgcggtggaggctactgcgaacaaggtatgtaaaaccgtcaagccatgcggccatcacttctgtctgcggtcagtttctcgcggcgcctgccccttcgggttgacctatctcaagcgcatatcgaggccggcgcctacgctgaatgcagcgaatcgcaacatcgagcacacccttgcccttcaggagatccatcatgtaccagcgcatcctgctcgccgtcgatggcagccgttcttccgacctggcactgagccaggccatcatcatcgccaaggcaaccggggccgaggtcaaggcgctgttcgtggtagacgacagcgatgtgttcttcgaggccagttacttcaatccaaaagaactggtcgacaacatcaccgcgcacggccgcaaggcactggatgccgcctcagccaggctcagcgaagcaggcgtgcgcaattcggtgaaactggatgaaaagccggtggcgccgggccggatctcgttgaccattgtcaccgaagccgatgcgtggaatgccgacctgatcgtgcttggcacccacggccgccgcggcgtccggcgcctgctgatgggcagcgtgtcggaaggcgtgcttgccaagaccagcaagcccgtgctcctggtccgcagcgaagtcgaaggttaggcgcgccatgccccaccaaaccatgcgtgcaatggtcttcgagggcgcaggcctgccgctgcgcctccaccacttgccggttgccgaaccggggcccggcgaacttcgcattgccgtgggagcttgcggggtgtgccggaccgacctgcatatcgccgacggcgacctgcgccatcccaagccggtgctcatcccgggacatgaaatcgtcggacaggtggattcgtgcggcgccggtgtcaccgtcttcaagccgggggaccgcgtcggtgtgccctggctcggacatagctgtggccattgtcgctactgcctgcgtcatcacgagaatctttgcgacgcaccgctgttcactggctatacccgcgatggcggctatgcggagtacgttgttgccgacagcggctattgcttccggattccgcccggctacgatgacgaacacgccgcgccactactctgcgcgggcctgatcggctaccggacgctgcgcatggcgggcgcagccagccatgcgcagcgcgtcggcatctacggcttcggcgccgccgcccacctggtgacgcagatcgcggtggcgcaaggccgcgaagtctacgccttcacccgcacgggcgacgcaggcgcccagcaactcgcctaccaatccggtgcgtgctgggccggctcgagcgagctcgagtcgcccgtgccgctggacgccgcgctgattttcgccccggtgggcgcgctggtgcccaaggcgctgcgcgccgtggacaagggtggcatcgtggtctgtggcggaattcatatgagcgatatcccaagcatgccttaccagctgctttgggaagaaaggcgcctgtgttccgtagccaacctcacgcgtgccgacggcatcgcgctgatggatatcgccgcccggacgccgctgcatacgcacaccaccgcgtatccgctggagcaggccaacgaagcactggccgacctgcgcgagggccggcttaccggcgccgccgtcctgaaagtccgtcaatagatccctggcagatagatcgatgagccgttaccagacacgttttcaggcgcgtgagcatgcgggctcggagctcgcctgggcgttgcgcgcgtatcggggaaccgatgccctggtgctggcgattccgcgcggcggcgtgccggtcgggcgtgttgtggccgacgcactgggcgctgacttcgacctggtgatggcgcgcaggatcgttcctggcgtagcactggacgactctggcgcgacatggtgcacggacgcaatggacgcaaatggcggcgccgacagccagcgtgatgcccagttcgaccagcttcgcaggcagcgcgccgtgtatacgccggtccgcaagctggcggatccgggcggtcgcgtggtgatcgtcgtggatgacggcctggtgagcggcgcaacgatgtatgcggccctcgccagcctgcgcaagcggcaacctgcccggctcatatgcgcactcccgatcgccaccccagccgggctggaccgggtccgcgccctggccgacgaagtcatctgcctggatactccggaccgcatcgaaaacctcgcgcacttctatcatgagttccagctggtcagcgacgaccgcgtgcgacagttgacagggataccgccaacgcagccccggacccgtgcccggccaggtgcggtggcgggcgtgccgtcgttgagcaaggcgatgctgattccgtatcagaccactcggctgcgggccatgctcgaaacggccccgaacccggtcggcgtcgcggtgatggtgtatgccggtggcgcgcaacgccgtgcagcccgcagcaattacctggcacgcaagctgcgcgcgaaaggattcgccaccatgctcgtagacctgcagcctgacagccgcgtcgacgacgcaccggaatcggaggtcgatgagctggtggcaagactggaccagaccttgagcttcctgcgtactgggaccccttgcgcaagcttgcctgtgggcctgctaagtaccggcaccgcagcggcggcagccttgcgctcagccgcgtgcggcgcgacgcaactcagcgccgtggcctgtgttgcggggcggctggatctcgcgggcagcgcaaccctgcggcagcttgaaatccctgccttgctgatatgtgccagcggcaatccgaaagacatccagatcaacaatcttgcattcgagcagatgcattgtccgcggcaactgaggctcatcccgaccagcggccgcggatttgaagaccgcagggccctggaagacatcgcggcactcacgataggctggttcgagcggcaccttgcgaccccatcttgtccccgcctgggttacggcggatgaccatgcctggcggttacgcggggctgcgcctgatgcgtgcggctcaaccccaaagaccgcacaacaatcttggggccaataacgggagcccgtcctttgacatggggcgaaagccggcgcggatctcgataccgcagcgcccctactccacgcgcggcatccgctcctgtatcgccgctgcaagttccatcagtggcttagccagcgccgcctcgacagcaccggcatcctggtgcgtggatacgctgacgttcaatacatggacggcatattcgtcaaatcgcaatggtgttgccatggccacaacctgaggctgccatgacgcgacgcagtagcctttctcatgcacggaagacaccgcagcatcgatttcgcgtcgcagctccccccagccgcggccgcggttcttgtcggccatggccctcatcatcgcgttgaacgcctcaggtgccagcgttgcgaggtgcgcgcggccgagagaggtcagtgccatcgggatgcgctgcccgctcaccaccgtgcgcagtgactggcgccggttgtagcggaacgactccaggtaaatcatctcatctccctccgccaccgccagtccgacattgatcttgtgccgcatggcaacctcggccatcatcggcgccgcgaccctgagaacctgcgagccgtcgcgcatggcatgcgccatgctgaggaccggcacacccagccggtaggcccggcactgcgggacatactcgagcatgccggtctcaatcagcgactgcgtcaggcggctgacggtcgagcgggacaagccggtgcgctcggcaatctcgctgttgccgagcatggacgcgccggcgcggaaggcgcgcagtacggcaatgccacgttcgagcgagcggttgggcgtcgccttgccttggcctggtttgatccgttcgatgttgacggtgctgtttggcatgacaggggatcactgcgcaccagtgaccgttctggaaagcggcgtccggtgcatgcatttgctgaggttgcacccgccgcaggcaatgctactcgatgccgatctccttgtcctacaccgcttgtgttcgtcatgctggtgaccgcgttggcgccggagcgccgctgctcagccaaacaggctgaccaccggctccgtctcgaagtgccagatcttctgcgccagccggcgcgcgccatcggcgcctatcaccggcgctgccagttcgatcagcttgccgccgaggtcagcgtcggacagcgggtcctccggatcgcccttgcgatttggctgcaagtagtctgccgtggccccgtccagggtttcgatctcaatccttgccgcgcgcttgccaggaaaccagccgtcgatttcagggtcgacctcgacagtcatgcagtccatcagccggcgcgtctcgctgtcccacaaccgttccggcgtgtaggccgacaagcgcacgctgccatgcaccagggcggcggcgacgatgaacttgaggctgaacttggcttcgttctcgctcctggggtcgagatagcaggcgatatccagcgccgggcgatacgtggcgacgcgaatgcgacggatctgggcggtgtcgatgcccagcttcgctttcagcgccagcgcgccgtcgattgccgcaaaggtatggccgcagccaatgtggttcttgaaggtcagccggcaaatatggaagtctttcccaagcgtcgatgccagcccgttccagtcagggccgtccgacatcgctcgccccatgccggtctcaccgtcgagcacatcgagcgaaccggtgatgccggcaatggcggcgcgggcggccagcaatccgccctccgctgcgcggcctgcgtgcagcggcttggacatcgagtccatgcggaacgcctgctgcagtccggcggcgaaggtcgccgcggtcgccagcgcgtgggcaagctgctcctcgctcgccccatggataaacgccgcggcggccgccgcgccaaacgtgccgacagtcgcggtgctgtgccagaagcgatagtgcgcccggcccagcacgacgccgatgcgcgttgaaacctcatagccgacgacgatgcccttgagcagcgtctcgccgctggcgcccgcgtcctgtgccgcagcaatggcggcggcaatggtggcggcgccggggtgatacatggcatcacggaaactgtcgtcgatctcggcagcgtgggcggcagcgccattgagcagcgccgcggcgcgcgccgtggcgcgttgccccattggcagggtggcgttgccgcggccaagctcctcttccagcacgcgctgcaggcgctggaccgcatcggtgccgatgcccgggaacagcgccgcatgccagtcgaccagcgcgcgcttcgcatgatgcatcacctcggctggcagcggtcctgccttgatggtgctgaagaaaggcccaaaggcctcggttgcgttcaagataggttctcctcagccggcctgcgccggcgtgtcggggagctgctgcagccatgcctgcagcagccggttgacttgttggtgggcctcatactggacccaatggccggcgcccggcaccacgctgacactgacttcgggcgcgtcggctgatgcatgccgcgagccgcgggcgatcccggcaatcgattcgggcgacatggtcacgtccgcttcgccccagatcatcaataccgggccgggaaagcgcgccagcgcctgctgcaatccgcctgcgcgcgagatcgatttgctatggaagcgggtcgcgcgacaggcacgcgtgtggatggccacggtttcgctgtcgatggcggccggatcggcgatcatgaatgccgccagattgtcgcgcatcgccgcggcaagcgcgtgcggatcgtggcagcggcgccagtcgaccagcgcccgcgtcatgcggcgcggaccgccatggccggccggcccgagcaacgccaggcgaccgacatcgatatcgccaaggcccgcatgggtcgcaaggtgcgccgccaccagcgcgccgaaggaaaagcccaccaggtcgacacggccaggtgatagctgggccagcgagcgggccaggatctcgacgactccaggcagatcggcgcgcggcgccgcaccggaatcgccaaagcccggcatgtctggcaccagcagccggcggttccgggacaacggcccgatattgcgcgtccagtgctgccagctgccatggccgccatgcaacagcacgctcgccgggccgtcgccaaagcttcgccagatgatctcgcacccatcgaccgaagtcaccaacacaccgtcgcgcacgttgcacatgccagggtctcgtcagggcttgtcgttgccggccagcaccgccacgccatcggcggccatcacaccctgcccttcgggcagcacgaacacgggattcatctccgcctcgaccagccggtcgccaagcgtggcgaccatgcgcgagaaggcgacgatcgcgtcggccagggcttccacatccgccttcggccggccccggaagccctgcagcagcggggccgtcttcaggcgcccgatcatcgccagcgcggcgtcgcggctcaatccgcgctcgccaggcagcagccgcagcgtggtatcgccgaacagctccgcggtcacgccgcccatgccgagcaggatcgcggtgcccagcgcgtcgcggtgcataccgaggatcacttcgacgccggccttgaccatttcctgcaccaggaagcgttggggcgcgatacccgtggccgactgcacgtcgcttgccattcttgccagccggcttcccacctccgcaggcgggacattgacggccacgccgccgacatcgctcttgtgggtgatctcggccgacaggatcttcagcacgacattgccgctgaaggcttgcgccgccgccatcgcctcggcgccatcgtcaaccacaacctccttcgcaaccggtacgccgaaaccggcgaacaaggtcttggccgcggcttcgtcgagcgagccggtgccataggaggtgagatcgggcaacggcagcgtgggagtgcccgcttcgtcgaccgcgccgagcttgccggcacgcagcatcgcgtcgatcgccaccgtgcaagcctccggcgcggaaaacgccggcacgccacggcgattgagcagcgatgcgacttccggcgcatgcgggctcacgtacgcaatcaccggtttgtcgctatggggcaggcagtcgcgaatggcattggccatcaggtctggcatggccaggctggacgagcccacgatgactgcgaccgcgtcgtagctcgggctgtcgagcaggatgcggatcgctgcgcggagcaggtcgggctgcagcccggccagggttacgtcgatcgggttgcggtcgagcgccgcgtggtcgcccttctgcagcgcgcgcagcttcgccgcggtcgcttcgtcaggggccggggtctcgaagccggccacgcccaggctgtcggagaccagcgtgccggcgccgccggtcgaggtcaggatcgcaacgcgattgccagtcagtttgcgcccggtagccagggcggcgggcatgtcgagcaggtccgagaaggtctgcgcgcgaatcacgccgacctgctcaaagagcgcgtcatacatgcgatccgtaccggccaacgcgccggtatgtgacaccgcggcgcgcgcaccactctcggagcggccgatcttgaacgccaccaccggcttgccggcgcgcgccgccttcagcgccgcgcggcggaacgtctccgggttgcgcacgctctcgacatacagcgcgatcacgcgggtggcctcgtcatcggccaggtaatcgataaagtcggccagatccaggtcgacttcattgctggtcgaaaccagcttggacaggccgatgccgcgtgccgcggcgcgcgacagcaaggcaccgaggatgccgccgctttgcgacaccacgccaatgctgccggccgggaactggtccatctccagcgcgccgctggccgacagcgggatgttgtcggtcaggttgaccaggccgatggtattgggccccagcaggcgcatgctgccggccgcctcgatcagctcagcctggcgccgcgcgccctcggcgccggtctcggtatagccgctcgccagcacgatggccgcgccggcgccgcgcgccgccaggtcgcgcacggccaggtgcgcacgctcggcgcccagcagcacgatgccgacgtccggcacttcgggcagcgaggcaatgtccggatagcaaggcagcccgtcgatcgactcgaccttggggttgaccgggtagatcgccccgctgaacccatgcttgcgcaggtaggaaaccgggcggcctgcagtctttgcggggtcggcggatgcgccaatcacggcaacgctgcgcggcgtgacaagtctttggatggcattcatgtggtcaggccttgctggcggtcttgttcaggaaagccagcacggagtcgcgatgctcggtgctggtgtagcagatgccctgcgcctggctgccctgggcgaagacctggtcggcgggcagttcgaaggactggttcatgatgctcttgcccagcgcgatcgcggtagccgagccctggctcagttgcgccgcccagctcagcgcatcgtcgatcagcgcttcgggcttgctcaggcggtccgcgatgccgagggccgcggcctcctgcgcctcgaccttgcggcccgtgaagaccagttccttcgctgccggcagccctacgcggcgcggcaggaaatacatgccgccaccgtccgggatcaggccccggttgatataggaccaggagaacgacgccgcttcggacgccagcacgaaatcgcagcacagcgcggtatcggcacccagcccggccgcggcaccgttgaccgcggcgatggtgggcttgggcatggtgtggagcagcttcacggtgtagtggacccgctgctggcggctccagccattgaagcccacctcgccgatgggcgcctccatgcggcgctgcatgccggccacgtcgccgccggcgcagaagcccttgccgttcccggtgagcaccagggcacgaatggccttgtccgccgccacgcgctccagcgcgtcgatgaattccgagcgcatgtcgtcgctcatggcattgcgcttgtcggggcggttaaaggtgagcagcgcgatgcccgattcgatcttcagttcaatcagggaatagttgtccatggtcctgtccggtgctatgtgtgcgatctgtttttttacgagtgccgcgctcagtcggccgtgatattggcgtccttgatgaccttgctccagcgctggctctcggccttgacgtagcggccgaactcatctggtgtgccgccactgatggcaagcccctcctgttcggcgcgcttgcggaacgcgtcggtgtgcacggccttcttcgccgcggcgttcagccgcgtgatcaccgccggcggcgtgccggccggtacgaacaggccataccagctatccgccacataattgggcacgccgctttccgcgatcgttggcaccttgctcagcgccggcgcctgcgagcgctgtgcggtcgtgaccgccaccgcccgaagcttgccgctctccaggtgcggcgcgactgcggctgccgtggcgaacatcacatcgacctgcccgccgagcaggtccgtgatcgccgggccggcgccgcgataaggaatgtggttcaagtcgaccctggccatgttcttgaacagctcgccggccaggtgcgccgaagtgcccgcgccctgcgaggcgtagttgagcttgcccggcttggccttggcggccgcgatcaggtcctgcacggtcttgatggggctgtccggcttcaccaccagcacgttgggcgagcggcccaccagcatgaccggcgcgaacgccttctccgtatcgaacggcagtttcttgtgcaggctcgggttgaccgcgtgggccagcgtcgccatcaccagcgtgtagccgtctggtgcgctcttggccaccgcatcggtgccgataatggtgctgccgcccggcttgttatcgacgatgacgggctggccaaggtcctcgcccatggtaatgcccatggcacgcgccaccaggtccgtgccgccgccgggggcgaacggcaccaccatgcggatcggcttgtcgggaaaggctgcgagcgccggcaaaggcgctgtcgcggccatgaggaacggaatggctgccttggcaagccggcggaacaatccggtgcagaacggatgcatgctttgtctcctggaacgagtcggaacgccgcggcatcacactgcgtgcaccgggcgcgtttctttgttggagacagcttaggcccaggcgggcgattccacacccccacaattccactgtatggaattcatagggcgccatcccgcgcggcaaaaaaggaggccctgcagagcccacaaactctgcagggccaaccgtatccccaaaccagtcccagaccgccagcccccgggaaatcaggactgcaaaccgacgacggacctgggtccggcgagcacattactcaggcctgaggcgcttcaatgggtgcttgccgtcagccgccggccgcgccttgcgtattgacataaagcgtatagatcgacgtacaggacgccatgaacagccgattgcgatggcgccccccgaaacacaggttggcacagcgctctggcaggctgatatggccgatgggttcgccgtccggggcaaagatgcgcacgccgtcgagttcgggcgtgcccatgccccagccgcaccacaggttgccatcaatatcgacacggaagccatccggggtgccgggcccggcgtcaaccagtactcggctgttgcccagcgcctcgccgccttcactgacctgaaaagcgcggatgcggcgaggccgggtgcgcgactcgatcacatacagcaattcctcgtcaggcgagaatgccaggccattgggcccgctgacgtcatcggcgacgatgtcaaggcggccgctggccggatcgatgcggtaaatgcgctccggcagttccgaagttgccttctcgccctggtagtagccggcgataccgaacggcggatcggtgaaccagatcgagtcgtccgatttcaccaccacgtcattgggcgaattcagcggcttgccgtcatagcggtccgccagcacggtgatgctgccgtcatactcggtgcgcgtgacacgccggccgacatgttcacaggtcaccagccttccctggcggtcgcgggtattgccattggcatggtttgacgggctacggaacatgctggtgttaccggtctcctcatcccagcgcaggatccggtcgttcgggacgtcgctccacagcaggtagcggccatcaccgaaccagaccgggccttcgctccagcggcagccggtggcaatgcggtcgatcgcggcaaggggcaggtggtatttctcgaagcgcgggctcagtgcctggacgcgcgcatccggatagcgcaccggctcggccggcgcaaggaaagtgtgcatggtcatggttcagcccagaggatccgaaaagagggttaaccgtggcgacgggacggggtaaccgacaacacggcacgcagcaatgagtcattgccagccgcagcttgcagccatcccagcggcgaacggtcgtccggcaccggatgctgatcagtcgcagcgtacgctcatgccaccgtcgaccacgatctccgtgccggtgacgaagcgcgcctcgtcggatgccaggaacagcgccgcattggcggtatcgcggccatcgcccatgaacccgagcggaatacgtgcctggcgctgggccagcagtgagtcgacatcaccgcccgcacgttgcccggcaaggcgcgcctccaccatgggcgtatgcatctggccggggatcaccgtgttgacgcgaatgttcttcctggcgtactcgaccgcgaccacgcgcgagagttgaatgattgccgccttggccgaggcgtagccgacctgggccgaaccggtccagcgcatgcccgaagtcgacgcggtattgacgatggcgccgccgccctgccgctccatgtgcggcagcacgtgcttgcaggtcaggaagacactcttcaggttgaagttgagctggcggtcccagtcttcttcgctaagctgcaccgggccacccctggccgagccgccgacgttgttgaccagcacatccacgcgcccgaagcgcgccacgcaggcatcgaccatggccttgaccgcggcggtgtcggtcacgtcgcacaggtgcgagtcaaactctgcacccgcggcgtccagccgctccagcgtttcacgcatcgcgtcagcgcttttgtcgacggcaaagatctttgcgccttcctgtgcaaagcgcaccgcaacggcgcggccattgccccaaccggggccgacgcaacccgcgccggtaacgatgacaacctttccttcgagacggcctgacatacggaatccttttgtgtttcggggtaacggtttgaacggaattcaggcgcgcaccagctccggcgcgctgccggccgggggcatgacaccaaaagcgttgatcgtcatcgagatcagcgtgtagtagcccgccagtccaacgaggtccaccacctggtccttgcccagcaccgccatcgcgcgctggtacagttggtccggcacattgcgcgtggcgtgcagcacagtcaggaactcatggatcacgcgctcatcctccttgacgaaggccggctcacggccggtgcggatcgcctcgaccacgtcttcggccacacctgccttcagcgcgatgggcttgtgtgcccaccattcgaattcggacatccagatgcgggccatcaccaggatggccagctccgacagccgcggcggcaacgacgagtcatagcggcagtactggcccagcgcctgcgcgcggttggccaggcccgggcggtgcagccacatcgcaagcggcccgcgaacctgcccgcgcggaccggcggcaatggccgcgtggacttcctgctgctcgggcgtcagttcttcgggtttcagtggcttgaggcgttccattcgcttgcgctccgtgtcgatggtcggaagcggaacgcaggccagggcaccgatggggcgcgatgcgactgggtcggccgggctgtctccgcttcattgttggtttgatgaaagctattctggtcgccggcattccggcttcaggcgacggattcggcggcggcgaggatgtggcgcaccggcgtcgtcgccagcttgccaaatgcgtcgatcagcacctcaacctgcgcgggcgcaagcacgtccgccgtcaaggcgcggaacttgtcccggatggctgccatgcgcgccggattctccgcggaacccgacgggttggcctggtacgcacgcagcggctcaccgttcttcgacatcagctccacccagccacagaagctggccggatacagcgcgtcgagttcggggtcgcgtacgatctcgatcgcgttggccagcgcgatgatcttcggatccgccaggcgggcctgcccgaactgcgccggcagcacctcgccatccagcagcgccaccgccagcgcgtaacgggcgctcatctgcgcgttcagcacactgcccggcgcatagcggtagccgcattgcacatcgacaacggccggcatgccgacgcgaatcggcccctgccccgcccagtcggcacgcagccgcagcgcaccatcgacatgcgcatgggcactgccgcagcaagcatagggcttgaagttggtccggggcatgtgccagtcgctgcccaaccctgccagcagcctttccggtttgggcgactccgagaacgccttgagccagccgccgtccccggtctcgaacaactgcgtcgggccggtcaggccgcgcgccgccagttcggcagccatcacgccggcctgagcgccgcgccccggatggaagcgcttcgaatccgcgccgtcgcaagcgaacgcaaacagtccgcccgactgggtgccggcaagacccagcgcccacgccgtgcgctcggcgtcgagccccagcatcaccgccgatgccgcggctccgcccagtggcgcgcacacggcggtcatatgccatcccttcatcctggccagcgccggctgcagcgccagtgagcagcggatcatggtttcgtagccgacggcaatagcggtttcgacccgctcgggcggcacctcgagcgtctccgccaacgcgaagaccgccggcaatacgaccgcgcccaagtggacctttgcattatggaagtcgtccagctcgtacgcgtgtgcagcggcgccattgaccagcgcggcatcggcggcgcggtacgtcctgccccgccggccccatgcgcgtgccccgccatcgcacggagcgaggtaaccatcgtcggcccagccacggatagcctgcgaccagggctcgtcatgcccggtcaggccggcgccgaacgtatccagcgagagtccggcgaccgcctgccgcaccgcgtccggcaggtcggcgttgcggatgccggcgatccatccggcgagctcccgggtgatggccatcgattgcgtttgttgatgcatgcttgcttgtccttgtccctgcccttcgctcaatcgatacggatgctggctgccttgacgatgcccgcgaccttgtcgatctcatccttgatcaccaccttgaactgttcaggcgtggactgcacggtttcaaaggccagttcgtcgaagcgcgtcttaagactggcttcgcgcacggccttgttgacctcctgcgacagcttgcgggtgatgtccgcaggcaggttggcgggaccccagagcccgtaccacgacagcagctcgaacccgggcaggccactctcggcaacggtcggcacgccgggaagctgcggaatacgcttgctgctggtgaccgccagcaccttcagccgccccgccttgacgaacggatatgcgcctggcatcggcgacaccgccgccgacacgtgaccgcccatcacgtcgttcaactgcggcacggcgcccttgtaggacacgatatccatctccagcttgaaggcgtggcggatcatctcctcggccaggtggctggtggtgcctagcccggaggtggcccaggtgtaggtccgcggcttggctttcgccagcttgaccaggtcgcgcagcgagctggtggggaggctggtgttggcgacgacgatcagcggcacatgccccacctgtgcgatcggggtgaaatccctgatggcgtcgtaaggggcgttcttcgcgaccagcggcaggtagacctggctggaggcattgaagagcagcgtatagccgtcagccgatgccttcgccaccgcttcggacccgatcatgcccgacgcgcccggtcggttctcgataacgatcgcttgcccaagctgacgctgcagctgtgcagccaccaggcgcccgactgtatcgatcgagccgcccggggtgtaagggatgatcatcttgatcgggcgattgggatacgcctcgctcgcgaacgccgccggctgcgatccgaccatcatggccatcatcgcgatcgcgccgatcccacccagcgccgcacgccgccctgttctgcctgtcctgttcatggctgtctccttggtttttgcgcggtctccaaaggcttccggattctttcgtccgcatgccgccgcgctatgcaggccactgtagggacgggccggcagaccgtccaatactgtttcgcaccatgagttatagggctggcatatgacacggcagcgcgctaccccgggttggttgcggctatcctagtaccttgtcccgcaaggaaatcagcaccatggaactccggcaactgctctatttcgtgaccgtcgcggatgagttgaacttcagcaaggcggcggtgcggctgcacatgtcgcagccaccgctctcccagcaaatcaaggcactggaagacgagatgggcgtggagctgttggtgcgcaatcgccgggaagtccgcctgaccgacgcgggccgtgccttccaggcagactgccgcgccgtgctcgaacaggtgcgcgtagccgtgaccaccgcgcggcgcacggcggccggcgacatcggcacactgcagatcggcatggtgacgtcaggcatcttccatgtgctgcctaccatcctgacgcgcatggcagagcgttttcccggactgcatatcgccgtgaccgacatgggctcggccgaccaggcgcatgccgtgatgcagggcaagctcgatatcggcatcgtgcattcgatcccgacgcgcagcggcctcggcaagacgccgatcttcaccgagtatttcactatcgtcgtgcccgagggccacgaactcgccgcaaggccggcgctggcgctccgcgacctcgagggcgtgccgctggtggcattctcgcgtgagcacgcgccggcgctgttcgacggcatgatcgcctcatgcctgcatgccggcttcagtcccgtcattgcgcatacggcgcgcaatccgctgaccactttccagatggtcaagctcggcctgggcgtggcgctggtgccgcgttcctacgcccgcgccgggctgccaggcgtggtgttccgcgagatcggccagaccgctggccacatccagctctatgcaatctggcgtgagcaggcgcccagcgatctggtcatgcgggtcgtgagcgaagtgatgagcgaaccgatcggctactaagccgcatctcggcaccgtcatgccgccttcaagccaccgtgcttcgcgccggagacagcgcagccacatagtcgatgatcgccgccacaacctcgtccagccgctccgggagcaaggcatgcgcggcatcgcggatggtgaggttggtcacgcgctcacccaggtagtcacgcagcacattggcatagcgctgcggtgcaatcacatcgtactcagcctgcacattcaggatcggcacgttgccgccagcgaagaagtcatcgaccggtgtgcgcttctgagccagcgtctgcatcgtcatcagctccgtgttccagccttgcagccacggtgcaggatcattgcacggcgcgaagaatacggcgcgcaggctttccaggcgcaccgcgtccggcaggctggtatcgccgcagcgctcgatctgggcgcgtacctccggcggaatcggcacggcatcgacgtccttcggcaccttgcccgccgagccggccagcaggaccagcgcgcgcaccaggtcgggccggtcgctggccacggtgcgggcgatccagttgccatgggcatgcccgacgatcacgaccggcgcctggccggcatgctcgatcacggccgcgatatcgcctgcccagtcgtgcaacgtcttgtcggcaagcgggccgacgctgcggccattgccgcgcggctccgggcagagcacgcgataaccggcagccgcaagcggctcggccagttccagcatgtcagttgcgccgcggccgagcgacggcagcaagacgatggccgggccggcacccagctcgtagacctcgatggagatcgccgccgagcgcgttacttcatagcgccggactgcgctctgcttgtcgccggcgtgcgatgttgcctgcgcttgctgctcggtgttgcctggcatggcctggtctcctcagtgtgctggtcaggacaacggcgtcctgcaccttgtgcgcaccactttaccgaggccattatttaaattccaatatggaatctgactgagagttatagggctggcgtgcaacaagcaagccctggagaacgcgcagaaggcaaacggattgaagagcaaatgagaagtgtcgggggaagactcctggtagcccgtggcacccacttcccgcggcgaaggccactccaacctcgccaactggcaccgggcacgccattgcagcgtgcccggcttgcagacgcttactcgaccgcgatgcctttctcgcggatcaccttgccccacttggaatagtcctgctggatgcgctggcccatctgcgccggcgcctggtagttggcaatggcgccggccttcagcaacttgtcctgtacatccttgtcggccaggatcttgccgacctcgcccgacacgcggtccaccacctccttgggcgttcccggcggcgccagcaggccgccccaggaaacggcgtcgtagcccttgaagccttgctcggcaatggtcttgacgtccggcagcatgctcacgcgctgcggcgagccgaccgcgatggcgcgcagcttgcccgcctggatgtgcggcagcgcggcgacgaggtcggcgtacatgatcgggacctggccaccgagggtgtcgctgatggcgggcacgccgcccttgtagggcacgtgctgcatctcgaagccgcccatctgcttgagcagttccatgctcaggtggccgaagctgcccgcgccggagctggtgtagttgagcttgcccggctgtgccttggcctgtgcgatcagcttgggcaggtcggtcacgttgggcagcagcgtcgggttgaccaccaccacgatcggcaggtcatagaccgtggccacgggcgtgaagtccttggtcgtgtcgtagcccgctttcttgtacaggtgcggcgccagcagcgtgggcgtggccagcatcatcagcgtgtagccgtcaggcgcgctcttggctacctgcgcggcagcgatggaacccgatgcaccggcgcggttctcgaccacgacgggctgcttcaggcgctcggccagcttctggccgacgatgcgcgacgccgtatccgtgggcccgcccggcgggaacggcacgacaagcttgatcggcttgctgggccaggattgcgcgaaagcgctgccggcgagcagcggcactgcggccagggccagaatggcacgacgccgggagtggaccatacgggtgaaatttcgagtgcgcacgatgttgttccagtttgaatcagtgcaagggaacccaagccccccttgccgggcagggctgcgcggacgcccatgagcgtccgcgcggcgcgaatactcaggcttgctgcggtgcctcgggcagcgtcagcacgccgcgggcctgcaggtcctgcaactgctcatcgctcatctgcagcaggttctgcagtaccgcccgcgtgccctcgcccagcgtgggcggcgcgttgcggatcggcaggcgctggccatccagacgatatgggggcgcgaacacgtgcgtgctgcctgccacgggatggggcatctcgcgcagcagaccgccctcgcgggtccgttcgctggtcaaagcctcgtgcagtcccgccaccttgccgcagggaatgccgcaggcggtcatgcgctcgagcagcaggtcgcgcgcaaagctgcggatcaggcccgtgatcagcggggtcagcgtctcgcggtttctggcgcgctccacattggtggcatagcgcgggtcctcgacgatgtccggacgctcgatgacctggcggcagaacttgtcgaactggctgttgttgcccaccgcgatgatcagcgggccatcggcggactcgaacatgccatagggcacgatggacggatgggcattgccatagcgggcggggtcgcgcccgagcagcatggcgtccaggccgtagtagccggtgaccatcagcccgcagtcgtacagcgccatctcgatcagctggcccttgcccttgcgctcgcggcggaacaaggcagccagcaccgcctgcgcggcatacatgccggtcatcaggtccaccacggctacgccgaacttcagcggcggcgtgtcggcttcgccgttgagcgccatgaggccggcctcaccctggatcaccaggtcgtagccgggacgcttggcctcggggccgctggtgttgtagccggaaaccgcgcagtagatcagctcgggcttgatcgccttgagctgttcgtagccaaggcccagcttctcggccccgccggtcttgaaattgtggatgaccacgtcgaactgcggcagcaggtcgtagacaatctgcacgccttccttgctctgcagatccagcgtgatggaccgcttgttgcggttcatgctgttgtagtaggtggtctcggtcttgccgatgcgcatgccccagtcgcgcgtgtcgtcgccgcggccggggtgctccaccttgaccacctctgcgccgaaatcggccagtacctggccacacagcggccccgcaaacacgcgcgacaagtcgagtacgcgcacgccctcaagcgggaaatcgatgccttgggattgatcaggcgtctgcattgttggtctccatgggctgtttcgaggcacgagccgtctgtgaataatcgtagcttatgtcgggctggcgtcacgcgatgccggcagggctgccacatagcgcagcacgcaggatggcgcgtgccggaatcccgaacgtcggtaccggcgatgaagactcagcgcatcgccgacgacggtgcgacagaaggaagcagaagctcttcctcgggcgtgaaaggtccccatcgcggtcagcctagcattcttgcttggataaatgcgctatacaatccctcttcacattgacaaaatgttcaataaaatttgacagttgatcctggggccgggcgaagcgcggtgcgcgcccaggcatttgacccataacatcgatattagacgcgcgcgttaccttgccctcttccgggatccgggcgcctcgtcacacaccgacaatcattcgaggagattccgttgaagccgtcgagcaaacacattgttgcgctgctgctggccgtcgccagcaccgcccacgccgcctatccggaccgccctatcaagctgatcgtgccgttcccgcccggacaggccactgacatcttcgcgcgcgccctggccgagaggctgggcaagcagctaggccagtcaatcgtggtggaaaaccgcgccggcgccggcggcaacatcggcatggaagtggccgcgaaagccccggcagacggctacacgctcgtcatgggcggcagcgcgatggctatcaaccagacgctgtacaagaagaccaattacgatccgcgtcaggacttcgcgccgatctcgggtgtgttctcggtgccgctggtgttcctggctacgccacaatcgggcttcacgtcattgcgcgacctgatcgccaaggccaaggccgcaccgggcaagtacagctatgccagcgctggcatcggcggcacgcagcacctgtctgccgagatgctcaaagcgcagaccggcgtgtttatcgtgcatattccctacaagggcagcggccccgcgcaggcggatttcctgggcaaccagattccgctgatggtcgattccgtgaccgccgccctgccgctgatccagaccagcaaggccgtgccgcttgctgtaacaacgtcaaagcgcgtgccgcagttgcggtcggtgccaaccgtgcgtgaggaaggcgtaccgggtttcgaagcgcttggatgggcggtgatgatggcgcccgcgggcacgccgccggcaatcgtcaatcagctcaatgcggagacggtgaaggcactgcaatcgcccgaactgcacaagttcattacggatcgcgggtcggagccgatgccgatgactccggttgagacggggaagtttgtggatagcgagattcggaagtgggcgacagtcgtgaagcggtcgggcgcaacggcggattgagggggcgaagtggtcgcccatgcgccattcctggcgtcgcagccggatgccagcccagccggtcgccgcttacagcggcccgggcagcgtcttcaggccgacccagagcaccacgatgacaacattgaccggcacgcagagcgctccgggcacgtagaagagtgctgacagcgcaggcgcggacagcaccaactccaccacgctacccagcccatagcagcagacaccgcaccagagccagcgccgcatgtaggttagcagccaatgcgcgcgcgccttgttgaaatgccaggcgagggctcgttcagcgcggttgcccttgctggcgtcccggtacagccagccgaagaagaagtagcggtacagcagggcgcgaaatgtcagctcttgcgtcatcactcatctggcctctgccagcccatggagtgcaaagatcttcaagccctcgccgcatgcaggaatgccagcggcacaggccaattgccgttctgttcaatatcattggtagaaacggccagcatggaagtcaagcgtgacgcttccttggggcatgagccgcccgcgccgaaccggactttcccctatttggagtaatcggccggtcgtgctacgctcctcagcgagcgatacccgtcccgacgtcgtgccccggtggggccgcgcatctgcagggcaatccgcagggcgtttcgggctcattctcatcgcttatccaaattagtctgcattcgaacctgagcggcatttctccgctcgtggagccgtgcgcgcggaaaaccggcacggatgacgtcgcgtcgtgaccggcgccgcgacgtcatttgtggttggtcatcctcttgcgcatgcacctcagggacgtgccggacggggcatctccgtgatcgatcgcgatccggacgccccgaggatacgtgcgcccaaatgaagctgcgggtctcgaatgcgatcgcccccacccctggcagcagggatgggcggaagaagaaatgacgatgagaccacgatgacctacaccaccaatatcggacgtcggcagttcctcaagatccttggctttggatctgttgccgtctcggcctcggcgctgggcctgggtactgcctgggcgcaggcgcctgccggcgtgcgcccctacaagctgctgcgtgcgaaagagacgcgcaacaactgcacctattgctcggtcgggtgcggcctgctgatgtattcgctgggtgacggcgccaggaacgcgaagccccgcatcttccacatcgagggggatcccgatcacccggtcagccgtggttcgctctgtcccaagggcgccgggctgctggacatcgtccattcgaagaaccggttgcagtatccggaatatcgcgcgccgggatcaaaggagtgggtgcgcatcagttgggacgatgcgaccaggcgcatcgcccgcctgctgaaggacgaccgcgacaagaacttcatcgcgcgcaacgacaagggccagctggtcaaccgctggctcagttcgggcatgctcgcctcgtcggcggcatctaacgaaaccggggttctcgacttcaagtttgcccgatcgctgggcatgctggcgctggactgccaggcgcgcctgtgccacgggccaacggtttcggcgctggggccgtccttcgggcgcggcgcgatgacgaatcactgggtggacatcaagaacgccaatgtcgtcatcgtcatgggcggcaacccggccgaggcccatccggtcggcttcaagtgggtgatcgaggccaagatcaggaacaaggccaaggtcatcgtcattgatccgcgcttcaaccgcaccgcctcggttgccgatatcttctcgccgatccgggcggggtcggacacggcattcctgatgggcatggtcaactggctgctgcagcacgacaagatccagcacgactatgtacgcgcgtacaccaacgcgtcgctgatcgtacgcgaggatttcggcttcgacgaagggttgttctcgggcttcgatccgcagaagctcgtctacgacaaatcctcctggaactatgagctggacgcggcggggaacgcgaaacgcgatccctcgatgcgccatccgcgctgcgtgctgagcctgctgaagcagcacgtgtcacgctacacgcccgagaaggtcgaggagatcaccggcgtccgcaaggccgacttcctgcagatcgccgagatcgtcggctcgtgctcggcgaaggacaagaccctgacctggctttacgcactcggctggacgcaccacaccggtggcgcgcagatcatccgcggcgccgcgatgatccagctgctgctgggcaatgtcggtatgtccggcggcggcgtcaatgcgctgcgcgggcattccaacatccagggctataccgaccttggcctgctgtcggtgcggctgccgggctacatggacctgcccgccgacaggcagcagaccctgaagcaatacctggccgatgccacgcccaaggccgtgctgcccgatcaggtgaactactggaagaacctgcccaagttcttcgtctcactgcagaagaacctgttcggcaagcatgccactgcggaaaacaactgggccttcgacctgctgccgaaatgggaccgcagctacgacatgctggcctatttcgacctgatgtacgagggcaaggtcaacggctatgtcgtccaggggttcaacccgctggcggcgatgcctgacaagaacaagacctcggccgcgctgtcgaaactgaagttcctcgtggtcatcgacccgctggtgaccgagacctccaacttctggcgcaacgaaggcaagttcaacgacgtcaagaccgaagagatcatgaccgaggtcttccggctgccgtcgagctgctttgccgaggaagacgggacggtcgtgaactccggccgctggctgcaatggcactacgcgggccagcagccgccgggcgaggcgcgtcatgacccggccatcctcggcggcatcatgatggagctgcggcggctctacgagaaggaaggcggcgcctgcccggaacaggtgctgcacatgacctgggacgaggcgacctatcacgatccgcacagcccgcatcccgaggaaatggccaaggaagccaacggctacgcgctggcagacgtgttcgacgagaccggcaagaagatcctgcgcaagggccagttgctggattctttcgcccaactgcgcgacgacggcaccacctcaagctactgctggatcttcgccggttcctggaccgaggcgggcaaccagatggccaggcgcgacaacaccgacaccggcctgggcaacacgccgggctgggcctggtcgtggcccgcgaaccgccgcatcctctacaaccgcgcctcgatggacgagatggggaacccctgggaccccaagcgccggatcctgcattggaacggcgagaaatgggtgggcgctgacgtgcccgactttccgctcactgcggcgcccggcacgcccgtcggccccttcatcatgctgcccgaaggcgtcgggcgcctgttctccgtcggcggcatgaccgacggccccttccccgagcattacgagccggttgaaagcccgatcgccaagaaccccctgcacgacaaggtcacgcacaacccgaccgcccgcatcttccagaacgatgcgcagcggatgggcaaccgcaccgagttcccctatgtcgccacgacctattccatcacggaactgttccgccactggaccaagcactcgcacctgaacgccatgctccagcccgagcaattcgtcgagatcggcgaaaagctggccgcggacaagggcatcgcgcatggcgacacagtgaagatcacgaccaagcgcggccatatcactgccaaggccgtggtgaccaagcgcatgcgcacgctccgggtggccgggcaggcggtcgatcagatcggcatcccctgccattggggcttcgagggggcgacccgcaagggctatctcgccaacacgcttgcgcccggtgtcggcgacgccaattcgcaaacgccggaattcaaggcattccttgtaaacattgaaaaagtggcgggagcgcaagcatgaactcgcagaacatcatccgtagctcggcctcgtcggagctgacaccagcccctcgtatccgcgaccatcagatggaagtggccaagctgatcgacgtgtcgatctgcatcggctgcaaggcgtgccaggtcgcctgcaacgaatggaacgacctgcgcggcgacgtgcaggagaatgtcggcgtctacgacaatccgcgcgacctgtcgcccaacacctggaccctgatgcgcttcaccgagcatgaggaccaggcgggcaagctggaatggctgatccgcaaggatggctgcatgcattgcgaggatcccggctgcctgaaagcctgcccggcgccgggcgccatcgtccagtacgccaacggcatcgtcgacttccagtccgacctgtgcatcggctgcggctattgcgtcgcgggctgccccttcgacgtgccgcgtatttccaagctggacaacaaggcctacaagtgcacgctgtgctcggaccgcgtctcggtcgggcaggagcctgcctgcgtcaagacctgcccgaccggcgccatcgcctttggctcgaaggcagagatgcaatcccttgccggcgagcgcgtggccgagttgaatgagcgcggctatgccagggccggcctgtatgacccggcgggggtcggcggcacccacgtgatgtatgtgctgcaacatgccgacgacccgaagcgttacgcgggcttgccgaaggacccggagatcagctcggtggtctccggctggaaggatggcctgaaacccgtagccggcttcgtcggcgcggcggcggtcgtgggcatggcggcgcatttcatggcggtcggccccaacatcaccgaatcagacgaacacgacgccccgactgacggcgcagcataagcggagaccggaaatggcgaccaacaacgacaggatcctgcgcacgaaattcgccgagcggctgtgtcactgggcgatcgtgctctgcttcttccttgcggcggtttcgggaatctcgtggttcttcccgacggtgagctggctgagcggcttccttggcacgccgcagatggcacggctgctccacccgttcctgggcatcgcggtgttcgcggggctgtgctacatgttctggcgctttgtcggccacaacatgcccgcgcgcaccgacgcgatctggttccgccgcgccagggaagtgctgctgaaccagcatggtggcgaaccgctgcagatcggcaagtacaacgccggccagaaggtgctgttctggctcattatggcttcgatcctggccctgctggtctcaggcctgatcatgtggcgcgcctatttcgccgagtatttcccgattcccgtgctccgcctggcgatcctggcccattccgtcgcggggatcggcctgatcctgctgatcgtgggccacatctatctggcgatctgggtccgcggctcgatcaccggcatggtgacgggctacgtctcgcgcgcctgggccaggcagcaccatgaccgctggtatggcgagttgcaggcaaaggagtcgaaagcggcgcaagcgaaggggaacgaggcatgaaccagcatcaggccacgccgggaacactgccatcggacgaggcctcccggcatttcacgccgctgatccagccagaccttgccggtctttacagccgccgcgccgcacgcctgcgcgcgttggccgaagggcacgaccttgccgattacctgcgcctggccgcccgcgtggccgaggtgcaggcatcgcttgtggccgaggccgatgtgtccggcccggcagacgccagggccatcccgcaggaggggcattggggcgccctgcttgatcggttgatcgagcggctcgcgcacgatgttcccgccccggtcgccccgcatcttgcggcgctgcgcgccctccctgcggatgcgcgccttggcgccgcccaggcgctgaccgagggccgctttgatgcggtgccggcagcaatcgcgcccttcctctgggctgcgctctcgctgcaatgtgccagcgccgcgcgggcggcgcccgtgcccgacagcggcccggccgagcacgcatcctgcccggtctgcggcactgcccccgtggcaagcctgatcctgatcggcgaccgccagggcatgcgctatctgcattgcgcgctctgcgagagccagtggcacatggtgcgggcgaaatgcaccaactgcggcgaagcctcggagcttgactacctcagcttcgacaccgccgaagctacggtgcgcgccgaaagctgcggggtgtgccacggttacctgaaggtgatctcactggaacgcgacccgccggccgaggccgtggccgatgaccttgcctccctggcgctggacgatgctgtgacggcggagggctatcaacggaccgggtttaatccctttgcgctgccgggatgaggcgctgcccgacctgtcctgctgacgaccagattcttcgcctatccgaacgcccgcacgccagtcatccattcgtgaagcacgaatccgaacagcacccagcctgccagcccgacgaccgccaccatcgcatcgcgcgcaggtgtcccggccgggtagctggttcctgcttcccggtcccgccggcgcgctgacacgaagtccgccaccgcccacgccaggaacgcgccaaacagcaccactgccgcgagtgttccgttggcaagaaggtgccccagggcccaggcctgcacgcctgcacgcctgccagcatcggatggccaagcgcagccttgatgcggttgcgaggcacataggccgccgcaatcagcacaaaggccgggatcgtgagcaatgcggcaacgtgccgcccccacaccggcgccgtccaggccatcacaggatccgcgctggccaggccgtagccccagacaaccagcgccaggccggcaatcgaaaccagggtgtacaagcctttccagcgacgggggccgagcctggcaatctgcgcggtgcgccatgggtcggcaaccatgcgtaccgagtgcgaacccagaaaaatgagcaatcccaaaaccagtaccgtcatgctgctacccctttctctagcgcccgtcccacgcctaagctagtcacaggtccagccttgaccaggagggtttcccatgcttcagaacagtgacgtcgcggccaggattcctgcgcaagacctcgcgcgagcgagatccttctactcgagcaagctcggtcttgagccagttgaggaacggcccggcggcctgcgctacaagtgcggcaacagctacttcgtacttttcgagtcggctggctcggcctctggcaatcacacacaaatggcctgggaggtcgatgacatccaggcaaccgttagcgagctgcggcagctgggagtcgtgttcgaagaatacgatcttcccggcctcaagaccatcaacgggatcgccgaggtccaggggaactacccgtccaagggtggcctgggcgagaaaggtgcctggttcagagacagcgagggcaacctccttgccatcgggcaaccgatcaggtgagtcgatcggcctgattgaactgctccttcggaccgtgcaccgcgctgcatcaccctggcttggaaggcttggtgctctcacgtgggccgccaacatgccatgtcatggcacgccgccgcccgcccccgcctgcgccggggccgccccgtcctcgcgcagccagacaataaactccgccccctgccccaccgcgctctccacggtaatgcggccgccgtagcgctccaccagcgcatagctgatggaaagcccgaggcccgtccccatctgcttcttggtcgtgaagaacggattgaacaggttgggcacgtcttcttcccggatgccgtgcccggtgtcgcgcacatgcagcgtcacgccctgcccgtcccagtcgcgcgtgccaagcgtgagcgtgccgccttcgggcatggcgtggatggcattggtcagcaggttgaccaccacctgctgcagctcgctgcggctgatgcgcacctgccgcgtggccaggcagtccagctcgacccggatcgacgcgcccttcagcatgtgctggaccaggtcgacgcagccagccgccacctcgcccgcatccaggcgctccatattgcccgcgtaggcctctggccggacaaactgcagcagccggttggtcagcaggtggatacgccgcacctgctcgtcgatcagcctcagctcgtgccggactggctcggcagccgggccaagaatctcgcgcgccacgtccaggttgccctggatgaccgcgatcggattgttgatctcatgtgccacgcccgctgtaaggtgccctgcgacgacgagcttctccgacgtgatcagctgctgccgggtggcacgcagctcggcgtttgcgtcctccagctcgcgcgtgcgctcggccaccttgcgatcgagcgagtccgcccagtccctgagctggtcattgcgctgccgcagggccgacagcagctggtcgaactggctggcgagctggccgagctcgtcttcgctgcgcaccgggcccacgcgcgcatcggcgtcgcccgccttcagcgcctgcatggtgccgaccatccgcgccatcggcgcgaacacgcgcctggcccagaacaaggccaataacgaccccgccacgcccagcagcaggaacaggcccaccaggaccccaaaagccaggttcttcacctggccgatgggcctggcaagatagccaacatagagcatgccgatccgctcgccgcggctgtccacgatcggctcataggcgctcatgtaccagtcgctgaccacgaacgccaggtccagccatttctcgccgcgcagcagcaccttgtcgcgcacctcgcgggagacccgcgttcccagggcgcgctcgccatggaacagccgaacgttggtggcaatgcgcgtgtcgtccaggaacagggtcgccgtgccctcgctgccacgaggcagcgattccggctggtagaccagcgcgttgatcgtgtcgatgaagccgaggttgtggttcagcagcgtgccgccatgcaggatcgccaccagcgttcccgcctggtcaaataccggtgcggctgcgtgcatcaccatgccgcggctttcctgggtcctgtcggtcggcgctgcgttggcggtggggcgtagcgccacctgtgcgcgtcgggcaagctcgccggaaaccgcggccagttgcgtggcagaccatacgtcggtggcggcgtccgtgcggccggcggcggcgctggccaccacgcgccaggctgcgtaatccgcccctgccgcaccggcaggcgcagcggcaagcagccgcccttgcggatcgagcaactgcaggaaatcgagcccatgcgtgcgccgcgcgtcagccaggatcccgggcatggcgccgccgcggcgaagtccgtccaccagcgcatatgacctcgcctcctgcaggacacggtcgcccacgccgcccaccatatgctcgaaatactcgtgggcgaccagcaggtcgctgttgaccttgtaggcaagcaaggcctggaacgcgcgattgccccacaaccccatgatcagcagcagtgccagcagcgccaccagcaggggcgcgaccacgatggatacgagcttggcccgcagcgaggcgcgatagtggcgcagcagcgcagccgggctcaaggacgcaggccccactgcaggcatttgcggtccagcgtgcggcgcgagatgccaagccggcgcgccgcttccacccggttgccgccctcggccgccagcacctgcaggatgtgccgccgctccaccgactccagcagggtgccgtcgtcggccggcatggctgcatcctcgcgctcttcctccggaaggttggcttgagccggatcggcctggtgcgcgagcagctcgaccgggtattcgccaaggatcagcgcccgctccaccaggttgcgcagttcgcgcgcattgcctggccagtcgtagcccttgagcacccggatcaatgagggcgacagcggcaccgccggcagcccgagctgggccgacagctgctccgagaaatgctcggccagcggcacgatgtcttccggccgcgtgcgcaacggcgggatggctacggacacgacatcgagtcggtagaacaggtcctggcggaagcgcccggcggcgacctcgttggccaggttgcggttgcaggccgcgacgatgcgcacatccacggcaatctcgcgctcggtgccgagcggccggatgcgccggtcctcgatcacccgcaacagcttggcctgcatcggcagcggcagctccgagatctcgtccaggaacagcgtgccgccgtcggcatagagaaacaggccatggcgcccgccggccgcgccggtgaaggcacccttggcgtggccgaacaattcgctttcaatgatctcgggcgccatcgcgccgcagttgagcggcacgaactggccctgccgtccgctcaggcgatgcagctcgcgcgccaccacttccttgccggtgccggactcgcccgtcaccagtaccgtcgatggcatcggtgccacccgtgccaccagcgccatgaccttcttcatcgcttcggactcgccgatgaagtgcttgtggatggtgtacttgtccagctcgcggcgcagcaggtagttctcgcgcgtgagccgggtccggtcgaagcagcgccggatcgcattgagcatctggtcgacccggaacggcttgacgatgaagtccgcggcgcccgagcgcagcgcggcaatcgccgtgtccatgtcggcgaaggccgtcatcaggatcacgtcggcggggttgccggccgcgcgcagtgccttgagccactccatcccgctggcaccgggcagcgccacatcgagcaggatcaggtcgaaatgccgttgctccagcagcgcggcacccgcttcggcgctgtcggccgtcaccacgctgcccaccttgccttcgagcgcgcgcgacaggaacgaacgcatgccggcctcgtcgtccaccaccaggatcgtgcgacgctgccagttgtcggcatcgggcgggttgctttgtctttcgctcatcactttagttgttgcggggcaagggaagagtctagcgacagtcggccacccggctgtattgggaattaaaccgagccggccgccgcacatggacattttggcccgggcaacgggcctccgtccggacattttgtccaaggctgcgccccggcgcgcggggccgcgcgacgcaatccattgacgacaaagggattgcgccttgggcatggcttttgctgaaccacgcactccagcccgtcgcatcacgcgcaaaaaagaggctgccacttccaggtaggagacaccttcatgtcataccccgcgcaagcgcaaacgccctcgcagaagtcccagcacgcgtcgccgtcccggccagcatcacgcccgtcggccttctccaaggaggccatcatcgcccgccccggcttcaaccgctggatggtgccgccggccgcgctggcggtgcacctgtgcattggccaggcctatgccttctcggtcttcaacgagccgctgacgcggatcctcggcgtcacgcagtccgcgccgggcgactggcaactgaccacgctgggctgggtgttctcgctggcgatcttcttcctcggcatctctgccgcctttgccggcaagtggctggagaaggtcgggccgcggcgcaccatgttcacggccgcgtgctgcttcggcggcggcttcctggtttcggcgctgggcatctggctgcaccagatctggctgctgtacctgggctacggcgtgctgggcgggatcgggctggggctgggctacgtgtcgccggtgtccacgctgatccgctggtttcccgaccgccgcggcatggccaccggcatggcgatcatgggcttcggcggcggcgcgatgatcggcgcgccgctatcggtcgcgctgatgaactacttcaagagcgcgaccagcgcgggcgtggctcagaccttcctggtgatgggcgtgatctacttcatctcgatgtcgatcggggcgctggccatccgcatcccggccccgggctgggcgcccccgggctacgtacccaccaccaaggcccgcaagatggtcacgcacgccaacgtgcacatcgaccaggcgctgaagacgccgcaattctacctgctgtgggtgatcctgttcctgaacatcaccgccggcatcggcgtgctgggccaggctgcggtgatgatccaggaaaccttcaagggcagcatcactgcggcagccgccgccggcttcgtcggcctgctcagcatcggcaacatgacggggcgcttcctgtggagctccgccagcgactacttcggccgcaagatcacctatgccatcttcttcgccttcggcgccgcgttgtacatggcggtgccggccgtcggctcgtccggcaacgtggccctgttcgtggtctgctacttcctgatcctgaccatgtatggcggcggcttcagcaccattcccgcctacctggcggacatgttcggcacggcctacgtcggcggcatccatggccgcctgctgaccgcctgggccgccgccggcattgccggcccggcgctggtcaactacatccgcgagcacaagctggccatgggtgtgcccaggtcagaggtctatgtcgacaccctgcacatcatggccggcctgctggtggcggggttcgtctgcaacctgctgatccggccggtgcatgagcgccaccacctgcgcgaagccaccagcgcagcctgagcgccaccccggcttccgataccaatacacaggagacaccaccgtgcaagacgaccgtactttcggcaagacgctgctgctgctcgcgttctgggcatacgtgctgatcccgctgggcgcggggatctggtcgaccctcggcaaggccatgaagctgttcagctgagcgctcgcgccggccgtccgctgcgtcctgatccatcttcgcagcgcacacccgagagcctcctgactggtgccgcgggatcctgtcgcatgactgtgatcccgcgcaatcgcgtcatctgtaccggtggcgcgaagtgcctggcaagcgctgcttccggcctgaagaactgagcttgaacggttccgcaagaactgtatccctagcgggcaggctgtagtccttacgcttgtccatggtgtcctgtcccgcaattgacccgatatgaaatcgcccagttgcccgccatgcgtcgttgctcgtcgttgccatggctacggctatggcgcctcctcgcgcctagcctgacgaccaactggacgatttcattcatcaagtcaattgcgggaccggacacagtctcgcgcgacacgccgtcgtgccggcggccaccccacggagagcacatcgatgtacggactcacagccctggaactcgctcgaatccagttcggattcacggtttccttccacatattatttcccgccatcacgatcgggctggcatgtttcctggcgttcctggaagcacgctggctctacaccaaggactcggtgtacaggaccctgtaccagttctggatcaagatcttcgcgttgaacttcggcatgggggtcgtttccggcctggtcatggcctatgagttcggcaccaactggtctggcttctcgcagtttgcgggaagcgtcaccggaccgctgctgacctacgaggtgctgaccgccttcttcctggaagcgggcttcctgggcgtgatgctgttcggctggaaccgggtcgggccggggctgcacttcttctcgacggtgatggtggcgctcggcaccatgatttcctccacctggatcctggcatcgaacagctggatgcatacgccggccggctacgtcatcgttgccggcaaggtggtgccgaccgactggctcgaggtgatcttcaacccgtcgttcccctaccgcctggcgcacatggtgatcgccgcgctgctgtcgacggcactgttcgtggcggcatcctcggcctggcagctgctgcatgaccgcgccgtgcccgccgcccgcaagatgctgtcgatggcgctgtggatggtgctgatcgcggcgccgatccaggcggtggtgggcgacgcccacggcctgaacacgctggagcaccagcccgccaagatcgctgcgatggaggggcactggaacaccgcggccaaggatgacaagggcggcttcccgctgatcgtcttcggaatccccgacatggaacgcgaggaaacccgctacgccatcgagattccgcgcctgggcagcctgatcctcacgcacagccttgacggccagatccgtggcctgaaggacttccccagggaagaccgccccaatgccacagtgctgttcttcaccttccgcatcatggttggcctgggggtggcgatgatcctgttcggcctgctgggctgggtgctgcgccgcaacggcgcgctgtaccggtccaaggccttcctgcgcctcgcggtggtgatgggccccgccgggctggtcgcgctgctggccggctggatgaccaccgagatcggccgccagccgtgggtggtctatggactgctgcgtacccatgatgccgtttccgcgcatgcggccggcccggtggcgctgtcgctggcactgttcgtggtgatctacttcgtctgcttcggcgtgggcatccgctacatgctcaagctggccagcgccggccccgcccccgacgcgcacccgcacgaagagccgtcctacggccccggcagcgtcgtccccgccgccatcgccgcggcttccacacccaacccgatggccccgcacggccagcgcgaatcctgaacaggtgatcaacatgggtatcaaccttcccgttatctgggccgccctgatcttcttcggtgtgatgatgtacgtcatcatggacggattcgatcttggcatcggcattctctttcccttcgtcggcgaccgtcatgaccgcgacgtcatgatgaacacggtggccccggtctgggacggcaacgaaacctggctggtgctgggcggcgcggcgctgctgggcgccttcccgctggcctactcggtgctgctcagcgccttctacctgccgctgatgttcatgctgatggggctgatcttccgcggcgtggcctttgaattccgcttcaaggccagcgaccgcagccgcccgtactgggatgccgcgttcacgtggggatcggtgctcgccgccttcttccagggcgtgacactgggcgcctatatcgacggcatcgccatggaaggcgccaccttcaccggcggcgcgctcgactggctggcgccgttcccggtcttctgcggcgtgggcgtggtgatcacctatgccttcctcggggtcacctggctcatcatgaagaccgagggccgcctgcaatggaccatgctgcgcgtgaccaacgtgctgaccggcgtgatgctggcaatggtcgccgcggtgagcgtgtggacgccgctgacccatccggagatcgcgcaacgctggttcgcgctgcccaacctgttcttcttcctgccggtgccgctgctggtgctgttctcggccttcggcatctaccggtccctgcgcaagcacccgaacgtgtcgccgttcctgtacgcgctgctgatgatcttcatgggctataccgggcttgccatcagcatctggcccaatatcatcccgccgtcgatctcgatcttcgatgcgtcgtcgcccccgcaaagccagggcttcgcgctggtcggcaccctgttcatcgtgccgatcatcctggcctacacctcctggtcctattacgtgtttcgcggcaaggtcaagcgcggggaggggtaccactgatggccaggatcccgcaatcgcggctggcggcccgcctgggctggctgctggcgctgtggctggcgggggtcggcaccgtcttcgtctgcgccagcctgatgaagctgctgatgcgggcagccgggcttgccaactgaagccatgccgtcctctggcccgctctcccgtcccgcgctgcccgcgcgcaccgccggcgtgttcgacacgctcgcggcagcctgggcgggacgccccgaccttgcaccctggctgcattcgctgaaggtgttcggcgcggcaatgctggcgctctacgtggcgctggcgctcgggctgccgcggccctactgggccatggccaccgtctacctggtgtccagcccgctggccggcgccacctatgccaagggcacctaccgcgtcttcggcacgctgctgggcgcggtgtgcgcggtggcgctggtgccctggctggtcgacgagccggtgctgctgatggccgcgatcgcgtgctggaccggcaccctgctctacctgtccttgctggagccggcgccgcgcaactacatctgcctgctggccgcctatacgctgccgatcgtggcgctgccgacggtcaccaacccggccacggtcttcgacgtggccctcacccgcatcgaggaaatcgtcatcggcatcgtctgcgccagcgtggtcagcgcggtggtgtttccctcgcgcaccacgccggcgctggccgcgcgcgcgtcggcgtggctggaccacgcctcgcgctggatcaccgacgtgctggccgccggcgccagcgcgggccagcgccatgacagcttcagcctgctggccgccgatatcctggcaatggaaacccagctggcgcagctgacctatgaagccgacggcgccctgaccctgcggcgcgcacgtgccctgcaccagcgcatgacggccctgctgccgctggtgctggcgctggccgatgccgccggcgccttgcaccggcatccggcgggcatgcctgacaccgtcgcgcagcgcatgcgcgccacgctggcctggatcgccggcgacgccggcgcgtcccggccgccgccttcctggtacccggcaggcaccacgcccgccgcacccgcggactggcatgcacggctggtcgcggcgacctgcacctacctggacgaactgggcgacctctggcaagactgccgcctgctgcaggccagcctgcgccagggcgggagcgagcccaccgcgctgcgctaccgcgtggaacccgccgggcaggcgcggcaccatgaccacgcgcaactgttgttccgcggcgccaccgccggctcggccaccttcgtcgcgggcctgttgtggatggtgtcggggtgggtcgatggcgccgtcccggtcggcctggccgcgcttgccagctgctttatcgccaccaccgcggagccgcggctgatggccggccgggtgatcgcgtggagcatcggctgtgcgttgctgtcctggtactaccagttcgtggtgctgcagctggcccatgactttggctcgctggccgccctgctgtgcggcccctacctggtcatcggcgccatgaccacgcagccgcgcaatgcgctgttcggcgtgttgctggcggtcacggcggcatcgttcccgggcccgcagcacctgaccgcggcaagtttcgccggcatcttcaacagcagcctggcaagcctggcggcgctggtgttcgcggccttgtgggcggtcctgatgcagcccttcggccagcagctggtggcctaccggctggcccgggccaactggaacgagatcgcgctggcggcgcacccgcgcgcgccggtcaacagcgcgcggctgcgcggccgcatgctggaccggctgctgcgccagtggccgccattgacccgccgcaacaatgccagcggcaggcacgccggcagcgccgttgccgacttcctggtcgaatccgccgcgctcgcgctgcggcgcgcccccgctggcgtgcctgcgccgcaccgccgtgccgtggagcgcgtgctggccggcgtggcacgccactaccgccagtgcgcgcgcaccggccatgccagcccgcccgctccggcactggcggcgcagatcgacgcggccttcgcggcgctggcctcgtcggcgcacggcagcccccgcacggcgctggcggcactggccaccctgcggctggccctgtatccgcctaccgaaggagagccccatgcacgccactgagttcgacctgtacggcgtcttcgtgccggccaccgtggtgtggatgctggccgcgttcgcggtgaccgccggcgtgcgcgccgtgctcgcccggatcggcttctaccgcatcgtctggcaccggtccttgttcaatttctcgctctatatccttgtactgggcgcgctcgtcgcgctcctctggcaggccccatcatgattcgcaagctttcgctgctcggccccgttgcggtgaccctggcggccgtggtcgccgcggcgctgaccgcctggcatttgtggcagtactacaccgaggcgccctggacccgcgacggccatgtgcgcgcagaagtgatccaggtcgcgccggacgtgtccggcctggtcactgccgtgctcgtcggcgacaacgcccgggtgcaacgcggccaggtcctgttcgtggtggaccaggagcgcttcagcctggccctgaaacaggcccaggccgaggccgcgtcggcgcgcgccgcgctggcactgggccggcgccaggcggcgaacgcggccgccgtggccgccgtggccgccgcgcaggcgcgcatcgacgaagccgatgccgcggtggacgtggccaggctcaacctggcccgctgccgcgtgaccagcccggtcgacggccatgccagcgaccgcctgccgcgcgtcggcgactttgccacccgcggcaggccggccctgtcggtggtggccagcggctcgcagtacgtggaaggctatttcgaggaaaccaagctgcccgcgatccgcgtcggcagcgccgccgaagtgcatatcatgggccagcgcactcccttgcgcggacatgtgcagagcattgcgcccggcatcgaggaccaggaccgcgccatcgggcccaacatgctgcccagcgtcaacccgaccttcaactgggtgcgcctggcccagcgcataccggtgcgaatcgcactggaccaggtgcccgccggggtccacctgatcgccggccagaccgcgacggtgcgcatccgggcgccgcgcgaatgaggcgccccgacgcagccataccggccccgccggaactgttctgcttccgctcctgccgatttgtacgcctgccgggcggcgatcggtccctaccatggagggcatggcatgcgccatgccctaccccattgcccccgggagattcgccatgcaagcagcgcttgtgcaagaaatgcccgccgcccgcagtcttgaggcgcccgagccggaccacgcatcacccgcctgccgggaccagctgggccgtccgctgcgcgacctgcggctctcggtgatcgaccagtgcaacttccgctgcacctactgcatgcccaaggagcgcttcgggcgcgactacccgttcctgtcgcctgagcagcgcctgtccgatgcggaactgctgcgcatcgtgcgcgcctttgtcggcctgggcgttgagaaagtgcgcctgaccggcggcgagccgctgctgcgcaagggcatcgagtcgctggtcgaacgcattgcggccatgcgtaccctggacggccggcaggtggaagtggccatgaccaccaacggcagcctgctggcccgcaaggcgcgttcgctgcgcgacgcaggcctgggccgggtcacggtcagcctggacagcctggacgaccagatcttccgcgccatgaacgatgtcgatttcccggtcgggcgcgtgctggagggcatcgacgcggccatcgcggcgggcctggcaccagtcaaggtcaactgcgtggtcgagcgcggcaccaacgacgcgcaggtgctgccgctggtggagcacttccgtggcagcgacgtcacgctgcgctttatcgaatatatggatgtggaaggcccgagcggctggtcacagtcacgcgtcgtcccgtccgacgagatccgcggcatggtcgaacgcgcgcatgcgctgctgccggtcacccggcgcgacggcgaaaccgccagcaactacctgctggcggatggcagcctgaagctgggttttatctccagcgtttcgcacccgttctgcggcgattgcacccgcgcacgcgtttcggtcgacggtcggctttacctgtgcctgttcgccaccagctctgtcgacctgcgccagcacctgggtgccgcgcgccccgatgaagccgttgcggacgcggtccggcaagcctggcaggcccgcggcgaccgctactccgagctgcgcgcggaccggctggccagcggcaagcgccagtacccgacggtgcgcatgtcgctggtcggcggctgagccgcgggcgcggctctcggccactcagtcaggattcgggaaagcctgcgcggcaagctccgcgccggctggtgtcaggctcgcgtgaccgcggccttcctcgtcgatcgccacgtccgccagtccggcggcctgcagttgcgtcaacacgcgccgcagcacgctcattggcagctgggcccgcttcgcgatcttggcgagcgaccaggggctgccgccgccctcgcgcccagcctgccacaggacctggagcgccgcgaccatggcgggatcgatatcagcgtcttgcatgctcttcctcgccgggttcccggctgcgcgccagcaggtgctgcgcgatcctgcccagcgtctgcacggcggactcgattccgggcgaccattccccgctgtagttcagccggatgcaatggcggtaagtggccccgggcgcaaacatatgcccgggcgcgatggtgatgcggtgctccagcgcggcgtggtacatctccatcgcatcgatgccctccggcagctgcacccacagcacatagcctcccgcagggcgcgacggggtggtgccgtccgggaagaacctgcgcaccgcggcggccatgatgttggcctgctgcgcataggccttgcgcacccgccgcaggtggaagtcgtagccgtcgttcttcaggaactcggcaatcgccagctgcggaatggcgggcgtggtcagcgtgttgaggaacttgagccgttccaccgcctcgcggtagcggcccggcagcgcccagccgatccggtaggcattggtcagcgtcttggagaacgaggagcaatgcagcacgatgccggccttgtcaaacgccttcaatgaactgggatgggcctcgccgtaatagagctcgccgtagacgtcgttctcgatgacggggatgtccttctcggtcagcatggccaccagcgcgcgcttcttctcatcgggcatctggaagccgagcgggttctggaaattgggcatcaccatgcaggcggccacgcccttttcatcgatcagccgcgccagctcgccgatgtcgatgccttccaccggatcggtcgccacctcgatggcgcgcatgcccagccgctcgatagcatggagcatggcgtagaaggttggcgactccactgcgatggtatcgcccggcctggccactgcctgcaggcagaggttgatggcctcggtcgcgccaatggtgacgatcacctcgttcggatcgatggcgtagccgttctccaggtagcggcgcgagatctgccggatcagctcggggctgccgggcggcaggtcgtcgagcatggtccacttggcatagcggcgcgcgatattgttggcgtactggttgatgcgctgccacggaaacagcgaagggtccggatagggcgaaccgagcggcacggcatcatcggaacggatcgaacgcagcgtggaaagcaccagcgcgctgacatccaccgccgagggcttggcactgggcctggacgggcgcagctcgaccaccggctcgcccggccgcgcgcgcacgaaatagccggactgcggccggctttcgatgatgccgcggctctccagcaagacgtaggcccggatcaccgtggtgatgctcatgcggtggtgctggctggtctgccgcaccgagggaatccgctcgccgggcaacagcaccccctgctgcaccaatgcttctatgtccgcagccagcttttcatatagtttcacgctgcgctccccttcccatgtccctcgcgcccggccggtgcctggtccggcccttgcgccgggctgctgtcagctgagccaacgatgaagatcatagtacggcaggggcacattttggagttgtccggcgcattggggttcgacccgcacaaagccgctggcctggccgagcgccgacaccgaggcggcaccctgctgtgcattgacctgcacgaagctctcgcggccgccgaggttgccgatttcgcccacgcgccagaaggcatcgccgcggtgcgggcgggtgcccgccagcgccgccctgacccggcctaccggcgggaacagctccacgcgcccctgcaggcggcgcagcagcggcgtcaccagcagcgcgaaggtggcataggccgccgccggattgccgggcaggcatactacgggcttgccgcgcaggcgccccaccgtgaccggcttgccgggcttcatgttgacgccacggcaaagcagctcgccgcctgccgaagccagcgccgccgcgaccaggtcgcgctggccgaccgaggcaccgccggtgaccagcaccaggtcggcgtcggcggcaagttcccgcagcatgtcgtgcaaggcgcgctcgtcgtcctgcacgtggcggtggcaactgaccacggcgcccatcgactgcaccagcgactcgagcatcgggccattgacgtcatgcacctggtacacgtcgcgcggctcgtcgtgcgccgccacctcgtcgcccgaagtcaggatggcaacctccaccagccggcagaccgtggcctccgtcagtccctgcgacgccagcgcggcaatatgccccgcatgcagcagggttcccgccgacagcagcaggtcgccccggcgggcgtcctcgcccttgcgccggatatgctggcccgccacgggtgcgcgcgcgcagaccacgccgcgataggtttcctcggcatcctccagcgcgaccacggcaccggcgccgggtggaatcacgccgccggtgtagatgcggatggcctggccgggcaacagcggctgcggctgcgtgccggcgtagacgacctgctgcagcggcaggcaggcgtcagcgcggcagtcttcacagcgcaccgcatagccgtccatggcactgcggtccgccgcgggcgtatccatgaccgcggccacgtcgccggccagcacgcggccggtcagcaggcccagccacacggtttcggtctgccgcacgggctccgcgcacatcgcgaagaccgcctgcgcctcgtcaaagttcagcatgctgcgcctccgcgggcggcatccagtgcggcgccggtatagtcgacataaccatcctggcggcagaagctgagcaggcgcagaccggcctgctcggcgatgcgtatcgccagcgaggtcggcgccgagatcgtcgccagcatctggatattcatgcgcgccaccttgcgcaccagttcatagctggcgcggctggacagcagcacgaatccgtcgtccatcgccacgcgctgcatcgccaggtggccgatcagcttgtccaggccgttgtggcggcccacatcctcgaacacatgcaggatctcgccgcccgcatcgcaccaggccgcggcgtggacgcccccggtggcctgcatcagccgctggtgcgacggcagcgccgcgaccgcgcgctcgatcatctcgcgcgacggcgtcagccgggtggccggctcgggcatgcgcgccggctccaggtcgagcagctcgatgctctcgatgccgcagacgccgcagccggtgcgccccgccagcgcgcgccggcgggcccgcatggtggcaaaggcgtgctcgctgatctccatctgcacctcggcgccgtgcgggtgcacgcgcacttccaggtcgtggatctcggcattgcgcccgacgatgccctcggtcagcgagaagccgaccgcgaacgcctcaaggtccagcggcgtggccatcatcacggcgtgcgagatgccgttgtacaccagcgccaccgggagttcttccgccacgttgtccgtggccggctgcaccaagcagtttttgtgccgcacgatgctgcgcgcttcatagcctgtgtgttcgaccagttcggtgcattccatgggatctctcgtaaaattatgtgcagcgcccgcttgcatgctgacggtttgttcccctctcccgcttgcgggagaggggaacgttcaccaggggtgtcagtcgcttgacgagcggtattgcgcgcagcgcgggatcagctcgccgccgcgttctggcgacgggacggcgtcagcaacaccggcaccgacttcgacgtgggcgtgccgcagccatcgcccgtgctttccagcggcaccagcggattggtctcggggtagtacgcccccaggcagccttgcgggatgtcgtattcgaccagcacgaagtcctcgacctggcgctgcacgccgtcgtcccagacactggtgatgtccacgtgctggcccgccttcaggccaagccgcgccaggtcagcggggctgatgaagaccacccggcgcaggccgaacacgccgcggtagcggtcgtccaggccatagatcgtggtgttgtactggtcatgcgagcgcgtcgtcatcatcaccatcagcttgtcgccatacttctggcgggcccggctgatgggggtgtccttgtcgatgcggttgaccaggaactgcgccttgcccgacggcgtatgccagacccggttgcatgccgccggcgtcaggtggaacccgcccggcaccgccacgcgctcgttgtagctctcgaagccgtcgatcacctgctcgatggcgtcgcggatgcgggcgtagtcctgcgcataccagagccagtcgatcttctccgagcccagcgtggcggccgccatgcgcgcgacgatggcaatctccgacaacaggtgcggcgacgccggcgcgttcatgccaaaggagatatggaccatgcagaccgagtcctcgaccgtcacgccctgcgccacgccgtcctgctggtcgatctcggtgcggcccagcgtcggcaggatcaacgactccctgccgtgcaccaggtggctgcggttgagcttggtggcgatgttcacggtcaggtcgcactggcgcagggcctcgaaggtgcgtggcgtatccggcgtggcggtggagaaattgccgcccagtccgacaaagaccttgaccttgccctcgagcatcgccgagatggtgtggaccacatcatagccatgcttgcgcggcggctcgaagccgaaggcggcctgcaggcggtccaggaattccggctcgggcttctcttcgatacccaccgtgcggtcgccctgcacgttcgaatgcccgcgcaccggcagcagcccggcgccggggcgcccgatgttcccgcgcatcatcatcaggttggacaggatctgcaccgtcggcacagagtgcttatgctgcgtcaggcccatgccccagcaggcgatcacgcgcttgcccttggcgtagacctgggtcaaagcatcgatgtcttcctgcgacacgcccgactcggcgacgatgtcggcccagctctccgcgcgcaggtcttcgatgaagtcgccgtagccgatggtgtgctcgcgcacgaaatccacgtcgatcaggcgctcgcggccgtgccggatggcctcttggtcgagttcgtccaggcgcttggccatgcccttgatcaaggcaaagtcaccgcccagcttgggctgcacgaacatcgaggcgatcttggtgctggagccggtcagcatctccaccgggtgctgcgggctggtgaagcgctccaccccgcgttcgcgcagcgggttgatcgagacgatggtggcgccgcgccgcgcgcattcgcgcagctcgcccagcatgcgcggatggttggtggccgcattgtggccgaacagcaggatggtgtcggcatgctcgaaatcatccagcaccacggtggccttgcccacgccgatggtcggcggcaggccccggctggtggcctcgtggcacatgttcgagcagtcggggaagttgttggtgccataggcacgcacgaacagctggtagaggaatgcggcctcgttgctggcgcgtcccgacgtatagaatgcggcctggttcgggtccggcagcgcgcgcaggtggcgcccgatcagcgcaaaggcctcgtcccaggcgatcgcacggtacttgtcggtctgcgcgtcatagaccatggggtgcgtcagccgcccgtgctgctcaagctcatagtccgtctgcgccatcagcgacgtcaccgtgtgctgcgcaaagaactcgggggtcacgcgcatgctggtggactcggcggccacggccttgacgccgttctcgcagaactcgaaggtggaggcgtgctgccggtccggccaggcacagccggggcagtcgaagccatcggcctggttctgcttgaacagcatcttgtacttgccaccggcaaccttctccttgatcaggttgatggcaacgtacttcaacgcaccccagccggcggcggggtgggtgtagggggcgatgtggcctttttcaggggtcggggagctcattggcgtggtgtcctgtaacgacgggggcgctgtccggcggcctgccagtgctgcggcggggaccggatcgttgcggtgtcaccagattagatttcccgggtgcccccgggtacatacaaaggggcgcttgcccggggagcacagttgcttcagaccagcgggaacgccttcaccacatgccgcagcaggctgtcggccaccggggacaggtgccggccggtccgggtgatgatgtggatgcggctgttgttcaggatgggatttgccagcggcagcgacaccagttgcctgaactgcggctccttcagcgccaccgagcgtgccgtcatgatgtagcccagccccatcgctgcatattcccacagcaccttgaacgagttggtgacaagcatcggcttcagggtgacgtgctcgtccagctccgccgcctggatatgcttgcgcacaccaaacgattccgtcagcgccgctccctggtgcggcgccagatccgccagcgtcagtgcgcggcgcttgcgcgccagcgggtggtctttacgcacatgcacgcggatcggcgacagccgtgaatagtgcgagcgcaggcgcacatcgtcgggcggctgaaagacgaagccgacatgcgccaggtcctccaggatatgccggaccgtttcatcggtgccggccacctggatgctgcagctcacgtcgggatgcttgcgcaggaagccctgcagcacgggctccagcaccaggtcgacgaagccttcgccaaagaccagctccacgtggccgcgccgcgcattcttcaggttgttgacctcggccaggaaggtatcgttcaggtcctgctggcgccgggcaaacagcgccagcaggcgcccggcatcggtggcgacaacaccccggccgcgccgctcaagcaaagtcagcccggtttcctgctccagtttcgccacggcgcggctcactacggacgggtccagctcaagcacctcggccgcgccgcgcaccgtgccggtctcgatgatctgcagcaagcacagcgcccgcttgcggtccagcacatcttccatgtcttcctcctctggctcgtgccgccgcctcaggacggcagcacggactttttaatgttgcaaattatgcaacgtttctgcctcatcattgtcatggtttcggcaagcgcctgcgtggagaatgctgtggacgaccacgctccgataccgccatgaaccaggccccgcttgccgaactgcaccaatccatccagaccctgtcgccggagttcgttgagatccgccgaaagatccatgcgcaccccgaactggcctttgaagagcgccagaccagcgacctggtcgccggacggctggcggcatggggctacgaggtgcatcgcggcatgggcaccaccggcgtcgtgggcaggctaaggaaggggcaaggcagcaaggcgctgggcatccgcgccgacatggacgcgctgccgattcaggaaaagaccggccttgactacgccagcaccatcgccggcaagatgcacgcctgcggccatgacgggcacacggcgatcctgctgtgtgccgccaggtacctgtccgagtccgttaatttcaatggcacgctcaacctgatcttccagccggccgaggagaacgaaggcggtgcgctgcgcatgctggacgatgggctgttcgagcaattcccctgcgacgaaatctatgcgctgcacaattccccggggctgccggtcggccagatcggggtcatcgccggccctgccatggcctcgttcgaccgcgccacggtcacgctgcgcggccgcggcgcccatggcgccatgcctcatcatggcatcgacgccatgcagtgcgccgccagcatcgtgcttggactgcaatcgatcgtcagccgcgagatcgatgcgctcaagtccgcggtcattaccgtaggctccatccaggctggcaccacctacaacgtcgtgcccgacagcgcaacgatcaagatcggcgtgcgcacgctggacccgcaggtgcgtacgctggtcgaagcgcgcatcagcgaatttgtcgccgcacaggcccagagcttccggctgcaatccgaggtcatctacgaacgcaagtacccggtactggtcaaccacgacgcgcagaccgagcgcgcgcgccaggccgcgatccggctggtgggcgcggacaacgtggtcgagcgcccgccggtgatgggcagcgaagacttcgcctacatgctggagcaccggcccggtgcctacatccggctcggcaacggcctgggcgaggatggtggttgcatggtccacaaccccctgtacgacttcaatgacaaggccctgcctgtcggcgccgcattctgggcgcacctgacgcaaagctatctggtttgaacaacaattcttcggggacatccaccatggcttcactgaaccgccgccgcttccttcaatatgccggtgtttccgccggcacctccgtgctggccagcctgccggcctttgccgcagacaacttccccgccaagtcgctgtccctggtggtcccctacccggccggcggtgccagcgacacttcggcgcgcatcttcggggaatccatcagcaagagcgtcgggcagcaggtggtcgtcgagaactacggcggcggcaccgggctgatcggcgccaacaaggtgctgggcgcaccggccgatggctacaccttcttccacggctcgatcaacgaggtcttcctggctcccatgctcaacccggcggcgcgctacaagccgcaggacttccagctggccgcgcccatcagcgacgccaacatcgtgctgatggtcaggaacggcattgccgtggataccctggacaatttcctggactatgcgaagaaaagcaaggggaaaccgctgacctacgccacggtcggcatcgactccatctatcacctcatgggcgatgcgctggctgcccggctcggcgtgcccttcctgcacgtgccgtacaagggcggcgctccagcgctgcaaggccttgccggcggggaggtcgactttgccatcctgccctaccaatccagtttcgacagcatgcagcaacagggccggctgaaggtgctgagcagcttcgccaaggccctgcccccggcgctcaagcatattccgctgatctcgcaaagccggctggtgcccgacttcgagtactcgatcggcggcggctacttcgtcaggcagggcacgcccgctagccgggtggcagtgctgcgcaaggcgattggcgaagccctggccaagcccgagatccgggccaagctcgaagccgagggacgtacggtcgcacagccgatcaacagccaggagcaggcgaatcaggtcttcgaccagtacctgggacgtgtcacgcaactgatccggaacgtgggccgcaagaccaacgcgtcctgaagtcatgtcgcagcgcgcgccttagctggccggccaggctgccttgggtgacacacccggggcaagccgttccgccaggaaggcctgcattgccgcccaggaccggcggtccgccgccgcatcataggcaatgccacgatccggaagattcgccccctcgaacgtgaatgcatgcagggcatggccataggcatgcagctgccagtcggcgccggcgccggtcagctcccctgcaatgccgagaacatcgttcggcggcgcgaccgggtcttcccaaccatgcaggagcaggatgctggaagtaatgggtgcttgcgggccgatccgcggcggttgaagcaccccgtggaagctgacggtagccagcaggttcggcggggccgcgcgcgccaggtccagggcgcacaggccgccgaagcaatacccaagcgcagccatccgcttcgcatcgaccccgggaaacgtggtggccgcatcgaacccggccagcaggcgccggcgcaacaagcggcgatcggccatcatcgggcccatgagatgcgcgttgtctcccagctcgtcaccacggacgcccttgccgtacacgtctgcggcaaagcagatgtagcccaatgccgcaagccggtcggcgcagcagcgcatcgcggcgttgagtccgctccattcgtgggccagcagcacgcacggcgtgcgttgggccagcccggcgggccgcgctacatacccttcgaagacagtcgtgccatccgtgtattcgaccaacgattgttccagcggcagattcccagcgtccatagcattctccttttgagccgccagcatgcggcaggcggggaacgctgtattgaacgtttgggacgccaggtgttgcgtcgtcagagatagaaggccggggcatcgtctggcaggagtccgaagtactcggcgagcggcgatggcccgttgcgcgcatagtcgcccggcgtctgggccaggcgccgccgccagctccgtatctgatgtggctgatcgctatagcctgacagcgcgtcgcccgcgccgcgctgcaccgcctggatgctggactgcagtcgctccaggtccatcaactgcttggggccaacgccaaggtgccgctcgaaccagcggttcagctggcgccggttgacggcggtcaggctggcgacttcctgcacttgccgtccctggcgcagcagcgcatgcgccgccctgatcgtcgccagttccgcagccggccggatagccgtcatgcgtcgcagcaaccacgcgtccagctggcaggcaaccctcgccggggtccaggcggcgctcaggtcggcgctgagcgcatgggtcgcgccatcgccaaggtatccggccaggtccagcagctgatccttgcagtccggcccgatgccggggaacagccgcgccaggcccgcgccactcagcatcgccatgacgaaataggtgtccggccacgaccgccattgccggctggtcgactggaagcccagcagcgacacctgcggcacggtcgggccgccctccatcgcgttcgggcgtccgaagttgatcgagagcaccgaccccgggtacgggcaggtcacgatccgcctgcccgcgtaaacacccgccaggtcctcgacgaaccagtagccgttgacgtagggcgccagggcggcgcaaggagcaatcacctggaacatagcggacgtgtcgtggcatgcgccggaaacaggacagccgtacctttatcacaaagcgtcgactagcgccggtggtcgaaccgccgcgccagccgttcaccggcaaactgcaccagcgtgaccagcgtcaccaggatcgcgatcacatggaacatcacggcggtctcgtagcgttcgtagccatagcggatcgccagatcacccagcccgccggcgccgaccgcgcccgccatcgccgacgaaccgatcatggcgatcacggtcacggtggcgccgccgatgatcgcgggcatcgcctccggcagcagcacgtggcgcacgatatgccagcggcggcatcccatggctcgggccgcctcgacaagccccgggtcgatctcattgagtgcaacctgcgagatgcgcgcgaagaacggtatcaggtgggcgctcagcggcaccaccgccgcccacgtgcccatggtggtgccgacgatcatgcgcgtcaccggaagcatcgcgaccagcaggatgatgaagggaatcgagcggaacatgttcaccagcaccgacaaggtccggtgcagccgcggccgcggcgccaggccgccgggagcggtcatggtgagcacgagggccagcaccatgccggcggcgaacaccacggcgcacgcgctggtggtcatcagcagggtctcgcccagtgccttgaaatacttgtcagccattggcagcagcacgatgtgcagtctcctgtctggttgtgtccggcacggcggccatgcggtgccgcaatggccgcagcagcgcgatggtggcttccgcgtgcggctcggcaaacaccttccagacggggccatgctcgatgacgtggccgtggtcgagcaccagcacgcggtcgcaggcttcactgatcaccgccatgtcgtgcgtgatcagcaccacggtcagccccagccgctggttgatgtcgcgcagcagcgccaggatctgttcagtggtctccgggtccagcgcggaagtggcctcatcgcacagcaggatctcgggccggtgcaccagcgcacgggcgatgcccacgcgctgcttctgcccgccggactgcatcacgggataggcgcgcgccttgtcggtcagcccgaccaggtccagcagctccatcacacggaccgcgatctcgtggcgcggcacacccgccacgcgcagcggcagcgcgacgttgtcgaatacggtcttggccgacagcaggttgaagtgctggaagatcatgccgatccggcgccgcagcgtcaccagcccgttctcgtccagcaggccgatatcggtgccgtcgatgcggacgtggccggtgtcgggacgctccagcatgttgatggtacgcagcagcgtcgacttgccggcgccgctgcgtccgatgatgccgaagcgctcgccgcggccaatggtgaaggaaatatcggccagcgcgggggcgcctgcccccgcgtaggtcttgccgatccccgcgaacacgatatgcggcgcggattcgcgcaacggtaggacagcgtgcatgctggctcgtcagaaggcagggatcacggaaccctggtatttggtctggatgaacttgcgcacctcgtcggactgataggccttgaccagccgcgcgacccacggcgcgcccttgtccttctcgcgcacggcaatcacattcacgtacgggttgtgctccctcttttccaccgcgatgccgtcgcgcgtggcgatcaggccggcctggtacgcaaaggtattgacgatggcggccgcatcgacgtctggcagcgcgcgcggcagcaccaccgaggcgctttccacgaactccagcttcctcgggttggccgtgatgtcggccagcgacgccgtgccggtatagggatcgaaaccatccttgagcttgaccagcccgtggtcgcgcaggatcaccagcgcgcgcgtctggttgctcgggtcgttcgggatgccgatgcgcgcgccgttgggcagcgcctccagcgacttgactttgcgcgaatagaacgcgatcggcgagatcagcgtatcgccgacattgacgatcttgtagccccgctgccggacctggtcgcgcaggaacgggatgtgctggaaggcattggcatcgaggtcgccattgttgagggcctcgttggggctggcggtgccggtgatgacgatggtctgcaccttcagcccctgcttgtcggcgacgcgcgtcaccacttcccagatctcttcgtcgaccccgccgcgcacgccgaccttgagtggccggtcgctggcttgcgcgtgggcgttgccgatggagagcgtggcaagcgccgtcagcgcggcgagtgcgagggtggcaaagaaagggcgtcgtgtcatggcaggtgggcagtgataaggaaggaccagtctaagaaacgcccgttgcccagtccacgaaggaatacgacgtagcaaatgcggacttctgcttacgccgcagcctgcgctggtacccgtcccgcaggccgttcgcggcccaggtgcgagcgcagcgtggtacccgcgtacgcagtgcggaagatgccgcgccgctgcaggatcggcaccacgccatcgacgaaggcctgcagcccgtcgggcagcgcatcgggcatcaggttgaagccgtccgcggcaccatggcggaaccagtgttcgatatcgtcggccacctgctccggcgtgcccacgatcacgcggtggccgccgccgcccgccagctcgcggatcagcgcccgcaccgtcaggttctggcgctgcgccaccgccacggtggcgcggaagaaggtgtggttgccgttggccggcagcgccaggtcatctggcagcggcgcgtccaggctcagccgttccaccgggatgcctagtgtgccggccagccgcaccaggctgtagtcccacggaatcaggtcgaccagctcgtcgcggcgctgccgcgcctgcgcctcggtggcgccgatgatggtggtcagccccggcaacaccttgaccgcgtgcgggccgcggcccagcgcttcggcacgtgcgttgatctcgcgcttgtaggccagcgactcctcgaacgactgcgacgcggagaacaccgcctcggcatgccgcgcggccagctcgcgcccgtcgctggagccgccggcctggaacagcaccggatggccctgcggcggccgcggcaggttcagcgggccctgcacgtcgaagaaggtgccatggtgcgccaccggctgcagcctggcggtatcgacaaagcgcccgtcgtgcttgtcgccgatcagggcatcgtcttcccagctgtcccacagcgccttgacaagatccgtgaactcgtcggcacgcgcatagcgctgtccgtggtccggcggcgcggcgcggccgaagttgcgtgccgagccggcatccgccgtggtcaccacgttccagcccgcgcggccgccactgacatggtccagcgtggcaaagcgccgcgcgatgttatagggctcgttgtagctggtggaggccgtggccaccagtccgatatgggtagtcgccgcggcgacgcaggccagcagcagggtcggctccagcgccgtgatcggccggaaatggatctggtcggcgatcgacgcattgtcggccaggaagatcgcgtcaaacttccccgcttcagcgatgcgtgccaggcggatgtagtgctgcacgtccacgaacgcacgcgggtcgctggcgggcaggcgccacgccgacggcacgaagccggaatggagcgcgttgatattcaggtgcagctggcgctgcggtgagcttgttgtcatcgttcgtctcccgcggctcagaacacccggccttcggccaggtgcgtggtgtcgccgttcaggtggtaggcgccgaccacgcgcgccttgtgcagcagcgggttgtggctgaagatcgtgcgcaggttgcgccagtgccggtcgaagttgtgctgcctggcggtggccgaggcgccgccggcctcgaacatgcgctcggccacgtgcagcgccagcttgctgaccaccagctgggtctgcgcggtggccagcgcgccggccaggaccagcgcttcggcgtcttcggagcgtgccagcagcgcatcggccgagcggtccagtgcgcgcgcattctcacgcacgagtgcgtcgatggcatggctgtgcgcggccaggtcgccgatcacctgctggatgaaatggtcttcgcgtgccgaggatgccgggctgtgcagcaccggacggccatgctcgcgcacatagcgcaaggcatcggcccaggcattgcgcacgatccccgccgccaccgccaccaggtgcagctggcgcagcgcgccgcagtgacgaccgaccagcgtgctgttggcgcgccgcgtcacttcctcggcgagcacctgcacatcgtccagcaccaggctgccgctggcggtcatgcgctggcccatgccgtcccagtcgtcaacgacgttgaagccggggcgatcggtcgggatgatgatcgaggcatcggcgccatcggcatcctttacattgatgcgggcgtagtcggcaaaggctgtgccggtggagtaatacttcttgccgctcaggcggtagtgcccgccgtcgcgccgcagcgccgtgctgatttcaccgggacgcgacgtgccgcgttcggtggaggcaccgccgaagatcgcgcccccgacaatgcgctgcacctgcaggtcattgaacgccgagcgcggcgccaggcgcagcgactcggtctggtcgaagtggatgcgcagcgcgtgcgcgacgttcgattcctccgcggcaagcgcggcaatgacctcgaacaggtcggccagcgagccgcccaagccaccctgctccaccgggagccggagcacgccaagcccggactcgcgaaacagcgcgaaggcctcatagggcagcagccgccgtgcctcgcgggcggccgcgtcgacgccaatcttccgcgccagcgccggcacggcgtccagcgcggcgcgcagcgcgtgccgcgcatcgaagtccaacggggcattcataaaggattccttccttgcggatgagcaggctcacaagatagggaaccctgcatcacacgggaacgaatgaatgcctatatcgttatctacccaatggactacagccgactccggaataagtgccactaagtgcactcgactgaaattgtagagatcgctacagagttgatccacactctacaagcacttagtatcggcccatggaaccagctccggaactgtggaccctcctcgtcatcagcctgccaaccaagtgcgccactgcccggatgcgcatctggcgggccctcaaggcactaggctgcgctgcactgcgcgacggcgcctatctgttgccgacgccaagcgcgcaaagcgctcaactacgtgacctggccgatgaagccatccaggaaggcggccaggcctggctgctgaatgtgcgcgcgcatgatccggcggaggctcacgcctaccggaccctgtttgaccgcacgaccgactacgccgtctggctggccgccctctccgaagaccgcaagaacttgtccggccaggacgaagccgggatcgcccgccttctgcgccggcacggccgtgcctttgatgccatcgccgggaccgatttcttccccaatgacgcatcggtcaacgcctccttgcaatggcgggacttcaccagtgcgatcgaaaccctgcgttcgccaggcgagccccagcctgcaagcggcggcatcccgcgccgggatcctgcccaataccaggggcgcgattgggcaacgcggcgccacctttgggtggaccgggtcgccagcgcgtggctgatccagcgttttatcgacccccatgcgcgcttcctgtggctggagcatcccgcggactgcccgcatgacgcgctgggtttcgacttcgacggcgccgccttcacgcatgtgggcgacaaggtttcattcgaggtgctgctggccagcttcgggctggacgccgaccgcgggctggcccgcctggccaacatggtccacgccctggatatcggcggggcccaggcgccggaagccagcggcttcgaagctgtgcttgccggcgcgcgcgagcgcctggcggatgacgacgcgctgctggccgaaatcggccgtaccctcgattctctttatgtgcatttttccggaaagcgatagcaccatgcccctgaggtccacgacgtgagcaacgtctcgcaggccccaacccctaaggccgcgctcacggaacggccgcgctacaccctctggcagctggtcggctacatgctgcgcctgggtacgctcggcttcggcggtccggtggcgctggctggctatatgcatcgcgacctggtggaccggcgccagtggatcaccgacgccgactacaaggaggggctggccctggcacagctggcacccggcccgctggccgcgcagctggccatctacctgggctatgtccactaccgcatcgcgggcgcgacgctggtcgggatcgcgttcgtgctgccgtcattcctgatggtgctggcgctgggctgggcctatgtgcgctttggcggcctgacgtggatgcagtccgtgttctacggcgtcggggccgcggtgatcggcatcattgcgatcagtgcgtacaagctcacgaccaagagcgtgggcaaagaccgcctgttgtgggcgatctacctggtgcttgccgcggtcacggtggtcaccgaatccgaaatcgcgtggatgttcctcgcggccgggctgctggtgtggttctggcgcgccccgccgaaatggctgcgccagggcggcctgcatgcggccgcggcgacacagctgcccctggccgggggcgtggctggcaccattgactggcccctgttggcacagatcgccgtgttctttgccaaggcgggcgcattcgtgttcggctcggggctggccattgtgccgttcctgtacggcggcgtggtcaccgacttccactggctcaatgaaaagcagttcgtcgatgccgtggcggtggccatgatcacgcccggccccgtggtgatcaccgtcggctttatcggctacctggtggccggcttgcccggcgcgtcggttgcggcgctggccaccttcctgccgtgctacctgttcaccgtcctgccggccccctacttcaagaaatacggcaagctgcccgccatcctggcctttgtcgatggcgtgaccgctgccgcggtgggggccatcaccggcgccgtgatcgtgctggccaggcgttcgatcgtggatgtgccgacggtactgctggcgctttgcacagtggcgctgctgctcaggttcaggaagctgcccgaacccgtgatcgtggccggcgcggcgctgatcggcctggtgatctatccgctcatgcatcattgacgggagcgccgcgccgggtccatgaaatcgctttgcgagcttgggcgcacaaccggcccactgccctggtggccgaagccacttgcgatggacggctttggggaatctaatccgacggagaggcgtcccgaggagggtcccatcgcgcaatgcacaaaatgcggatctgagaaccccgtgggcgccaattcttgccaaacgccatgccagcctcccactcaggaaccaccggcttccccacgatcctgtttggcgctttcgatcgccacaacttcggcgacttgctgctgccgcatgtgatgcgaagcctgatcgggccggccaacccgttctacgggggcctggccgagcgcaacctgagaatccatggcggccatcgggtccacaccctggcgcggcttgcagccagcgtgggcgacagcgccgtcgatgtcatccatgtgggtggcgaaaccctgacctgctcgctctgggaggcggccgtgatgctgcagcctcccgggcaggcccgggcagtagtggcaatgctcgatgcccggccgcacgagcggacggtctgggcccaggcgcagctgggcatacgggaccttgtcccctacctgttgccggccggcatctttgccaacgtccggcgtgtcattgtccacgccgtcggcggcattgaacttggatcggttgagcctgccatgcgggccgaggtggtggccaagctcggggccgccaccagcgtcggggtacgagaccatcagacccgggccatgctcgcggagaacggcattgcctgccgcctggagcccgatccggccgtgctggtggccgagttgttcggcccctgcatccgccggcgcgcccgccagggcgagtgcgcccgcatcgtgtcagggttctcggggggatacctggccgtgcagttcagcgcggattttggcgacgacgataccctttcacagctggcggcccagctcgaacgtatcgcccgggccagggccctgggcatggtgctgtttcgcgccggcgccgcgccctggcacgacgacctggcttgctaccagcgcctggcggcacggctgcgcggcacgcctgtggtcctgttcgaatcgctcaatctgtgggatatctgtgcgctgattgcgcacagccagggctttgtcggcagcagcctgcacggcggcattgtcgccggcgcctttttcctgccacggcttggcctgctccggcccgcacaacctcctggcaccagcaagcaggtcgcctttgccgcggcctggggcgcggccggggcgccggccgcggtgatcgttcaggatcttgcggacggcctggacgaagcgatggcaacccggaccgcgcagcgcagggaactggcctgggaatgggccaaggcatgcaggagcgcattccagctggttcaggagaactagcgcgatcgaagtgcccgcccgagacgcaagtccccggtacgaaaaagcgggcttccgaagaagcccgcccggtttgccgctagacgcctgtatatcggccggtcaggctggaacctgcgtccccgccgccgccgtctccttcgagaaaagactcctggaagtcgctacatggctggccagcaccggccgcaagaccatgatcgccaggaaggccgcgctcaggtccatggccgccaccgtgtagaggaccgtcgaccaggtgccgctcgcctccatcatcaggttgccgaccggcacgaacagtgcgccgatgcccttggccgtgtagagcacgccatagatcttgccgatgtgcttggtgccgaaggcatcgccggccagtgccgagaacagcgagtagacctcgccccaggccaggaacaccacgcccgacaggatcaggaaggcgtacgggttgctgccgaagtagccgagcgcgatgatgccaaggccttccagggtgaaggcgatgaccatggtcttctcacggccgatgttgtccgagatccagccgaacaacggacgcgagatgccgttcatgatccggtccagcatcagcgcgagcggcagtgcggccatcacgaagaagtgcaggtcgaccttgaactccttcacacccaggtccttggcgatgacgccaagctgggccacggccatcatgccgccggtgacgaccaggatgaacatcacaaacatcagccagaacagcttggtggacatcgcttccttgagcgtgtagtcgcgcgtggcctggaccagcttctgcgatgccttcacctcgctacccttcggtgcgcgcaggaaccacgccgcgacaaaggcgagtccgccctgcagcaggccgaagaacaggaaggtgtgctggaagccctgcgactcgatcatggccgcgatgggcaggatggttgccgcggaaccggcgccgtaaccgcccgcggtcaggcccaccgcaaggccacggcggtccgggaaccacttgagcgcgttgttgatgcaggtggcgtagatcgagcccacgccaaggccgccaacggctgcgccgacgtagaagcccatcagggtggtggcctgggagttgatgcaccacgccgcgccgatgaagaccgcgccgaaggcgaccatcatgcgcgggccgaacttgtcgatgaagtagccttcgatcggcgccagccaggtctgcacaaggacgaagacggtgaaggcgatctggatgctggcgcgcgaccagccgtaggtactctggatttcagggacgaaaagggtccaggcgtattgaatattggcggtggcgatcatgcagatcacaccgacgatcaattgcagccagcgtgtgccttccgggacctggcgattagcgcccagcgctgcggacggattactcatttgcgcgctccttgaatcatttggccattcagttgcgggggtgcgggcgggtatgcggacgcactgcgcctcagcataagggtggctgctggcatttcatgtctcctgtgtcattggcatttatttgcctcttattccgacgccgacctgaggtctccgccctcacctctctcaagttcggagtggcgatggaatacacagtatgtgatatatcaggtaagtcaagggaaaggcatggcagggttttcactgaatttatgattgcgaaggatgggttccggatattcacgctgaaaatgcatcatcgcccctggaaggaggcccggccgggcaccgccggataaccatgaaaccctttactggagccacttccgggcgcgtcgccgccgatagatgagggttcgttttgaatggatgaggaaaacgacttaaatcccatcattacaaatttgtcatacccggaagccgtccgttccggccagaacagcatgattacgaaaatgtcatgattacagaaatgtcatgattttgaccgcaccgaatgatgaacgaaataaatcagagcgattaatacggcataaaaccgcaccggcgagccaaaaaaaatgcccgcaggcaagcctggcgggcgtaggcatgatgcgtgacatcagccgcagcatgtagatgcagttataggcgattattcgggccagacaaataaataaaaacgcttagcgcggggtggcggtcagggattctcgaaaaccctgagggatttaccgaaaaaccctgagcgcgatttggcgagattcagcagatggcaacttgtcatgatggatttcgatttgctggccagatgcgctgctgcccgggtcggcaggcaagcactgtagacaagatcatccaggctgcccatgaaagtagatgaaacggtaagtactgtagaactcctggaagcccggcggccaggttgcccatccattgctatagatagaatggaaagcagcaggcatagaagtagatcttttggtaagttctgtagaaactctggtaagctcccgagcaaaccggcatccggaaattgcgaccatctatgtctcatgcgccacttggctacgacgcgcttatccgcaagttcgggctgcgcgtgccgccgctgcgctcgacgtccgcccttgccgacaagaccggggtcctcagcacgcacaccggaccggacggcaccacgcgcaccgtgtacccaaggaaccgctaccgcggcggcgatacgaccgtggaccacctgactttcgcgctgaagaaggagcagctcgacctgaccgtgctggcggcgctgttcgaacatgcgccagcggtgcaggccgtacgggagtggctggcggccaccccgacctcgcgctatgcgaggctgagcgcgttctatgccaaatggcttgccggagcgcaattcgactacaagctgccggccggggcgcccagggtactggcgctggacgagagccggtacctgaccggcccggcaacgccggacctgcagttcggcatccagaacaaccacctcggcccggccgcgttttgccccctggtgcgccgcaccgagaagctggcgcagtacattgccgccgacctccccggccgcgtggccgcggccatcaagcggctcgagccagagttgctggcgcgcgcggtggactacctctacctcgcggagacacgatcgacctactccatcgagcacgagatccccgataaccagcgggttgccaagttcaggcggctgctggaatatgccggcaatcccgcgccgttgaccgaagcccagctgtgcgagtggcagaacgaaatcatctcggggctgcgcgccgaattctcctaccgcgacaagcagaactggctgtcccgcggcgggcgcatgcgcaacatcgctgactatattcccccgccgcccgggcagcttggcgcgatgatggacgggattgccgcggtcgcgggcctggtcgaggcacaggcggcgaaccccatcgtggccgcggcgtgcgtatcgtttggctttgtcttcgcccacccgttctacgacggcaacggccggctccatcgattcctcatccaccatttgctgcgccaggccggtgtcacgccagatggcgtcgtgctgccggtgtcggcacggatgctcaagcagatcgatacctatgccgcgctgctgaagtcctattccgccccgcggacggccctgctcaactacgcgctggattcggacagcgacacgatcctgatcaagtcgccacagcccggctggctttacgcatcctttgatgcaacagcgctgtgcgaattcgtcttcgaatgcatcgagcagtgcgtcgagcaggaccttgcgcaggagatccagtacctgcgcgcttacgatgccagcgtcgcacgcctggaaagctggctcgacctgcgccagtcacgcctgtcgaacctgatcgacctgatcgtccagaaccacggcgagctgtccaggcgcaagcgcaagctgttcgaagacatcacggacgacgagctcgcccgcattgaagccgtcgtgcgcgacgaattcacggaatacctcgagctcaacggcagccgctgaagcggcggcacagcattggcactgcccggtgccgccaccatggggcggcaccggcgccactatgtatcgctttgtatcccgggccacggcagacatgaaagcttgcacggatgccgggaagcggaaacaacccggatacgtgcggacggtggaatgcgtctatcgccaacaccgggagttctccgccatgtccgtcgtcgccatccatccgccgccgccctgcccctgctatcgtgcctgccacgacaccgcgcacgccgacggaagccatccatgatcgacgccttccttgcctttgccgccggcgtgctgactattgcctcgccctgtgtgctgccggtgctgcccatgctgctggccggctcggtgggcgaatccggccggctgcgcccgctggcgatagcgcttggcttcgtcagcgcgttttccgcgctgggcatagtctttggcgcactgtccagcgccttcagcgaagccccaggcgtggtgcgcaacgcggccatcctgttgctgctgggtgccggcctggcacggctctggccggcgggcttcgagcgcctggcggccccgttagccggcgtggtcgaccgcctggcgggcgccggcggccggaccggcaccggcgtggccggcggctttgtgctgggcatgacgctgggcgcggtgtggaccccgtgcgccgggccggtgctggcgtcgatcctcgcgctggtggccaaggcgcaagacctgcatcgcgccgccggcctgctggcgctgttcgcggctggcgcggccatcccgatgctgggcattgcctatggcggccagttcgccaccactcacgtgcgccggctggcgcgtcacacgcaccggctgcagcaaggcttcggcgtgctggtggtggcgaccgccatcgccatgtacttccagtacgacacccttgccgtcgcctggctgacctcccttttccctgcctcccaacctggagcctgaaccatgcatcgcttgcttcgtaccctgcttgccactaccgccatcgtcgccgcccagcatgccgccgccgcccctgccgactatggcaaggcgccggaattcaccggcatcgacaagtggctcaactctgaaccgctgaccgttgccgggctgcgcggcaaggtcgtgctggtcgatttctggacctatagctgcatcaactgcatcaacacgctgccccatgtgcgtcagtggtacgacaaataccgcgacaagggcctggtcgtggtcggcgtccacaccccggagttccccttcgagaagtccaccgccaacgtgcaggcagcgctcaagcgcttcgatatccgctacccggtagcgcaggacaacgcctatgccacctggaacgcctggcgcaaccagtactggccggcgctctacctggtcgacgccaacggcaccgtggtctacaagcattttggcgaagggaattacgcccagaccgaagcggccattcagaaggcgctgggcaagaacaagtaagcctgccatatcgcttacaagcgaccattgagcgcgaatggcgaacgagcctgccgcgcgctgggccgtgctctccggcacggcccaggccttggagcctgttctcgcttccaagacacatccgagccggttccccggcacaccttacgaaaattcagattccccaatctctagttaataggaatcattctgattataattcgcggggttttcaaaagcacattaaacacatcactacgttcgcctgaccataaccatgcaaaccgcaacgcgctcagtcaccctggaggggccggccggccgcttccgggtccgtccgctcgcccttctcatggccgccatcggcgcgggcactccgctgctgtcagaagcacaggaggtggccgccggcgccgccgtggcacaaaccgggacgtccggtgcgggggcgaagcaggaaggcccgaccgctaaggccgacggcggcgagctgaatgcggtggaggtcagggtcgaccggatcaagagcgatctcgtcagcccgacgcgccaggtgacggtgctggagcgcgaggaaatcgaggagctgaaggtgggctccaccaatctcgcgaccatgctgagcaagctgatcccgggcatggcggactccagccgcacggtcacggacttcggccagacgctgcgcgggcgcggcacgctgatcctggtggatggcattccgctcaacaccaaccgggattcggcgcgcaacctcgccaccatcgattccagcaacatcgagaagatcgaagtcatgcgcggcagcagcgcgatctatggcgccggcgccaacggcggcattatcgcgatcaccacgcggcccgcgggcggcgcgcccagcgcggataccacggtgacgctcggcaccccgctgacgcggctgagcaaggaagggctcagcgccaatgtccagcagcatttttcaggcagccaggggccgatcgactacgcgttccacctcggcgcgcagcgtatcggcggctcctacgacgcgcacggccaccgcatcgcgccggagcccagccagggcgacctgttcgattccaacgtctacaacgtcagcggcaagctgggctggcgcatcgacagccagcagcgcatcgaactgagcgtgagccagtaccaggccaagcagaacaccgactacgcctccgatccgtcggtggccaggctgacgccgggcaccgccgcggcgcgggcgatcaaggggctgcagctggaaaaccagaacgaactgcgcaacaccgtggtcaatctgggctaccagaacctggacctgctcggcagcacggtgtcgacgcagatctactaccgcgactacttcacccgcttccccccgttcgatgcgcgcgcggtggccacgcgtggcggcaatgtggaccaggtcagccagaacagcgacgtgttcggcgggcgcctgaccatcagcaccccgctgggtgccgacaagaagaccaagctgctgtggggcgctgactacaaccaggagcgcagcgacatgccgctcgacgtgttcgatccgcgcgcctacgaccagagcggcgggctggtcttcaacaagaccggttcgctgacctacatgccgccgctgaccacccgcagcggcgggatcttcgggcagcttcagcacaagttcaacgagcagtggtcgatggaaggcggcgcgcgctatgaacgcgccagcgccacgttcgacgacttcgtgccgctgtcgcaatcgcgggtcagcaacccggtcgcggtccagggcggcaccgtcaactacggcgcgtggctcttcaatatcggcggtgcgtacgcgccggtgaagaaccaggagttctatgcctcgttcggccagggcttccagttgcccgatatcggcctgcagatccgcaatgcgcggccgggcttcaatatcaattcgtcgagccttgagccggtcaagaccaacaactatgaaatcggctggcgcggcgcattcggcaatacgatggcgagcctggcgctgttctacaccacctcgcagctgggcgacgtgcagagcttcaacaacggcctgatcctgacccggaccaaggaacgcatcgcaggcgttgaggcttccgccgactacctgagcgacagcgagacctggggcgccggcggcacgttcacctggatcaacggccgcgagcagccgcaaggcagcagcagcttccagaacatgacgggctatcgcatcccgccgctgaagctgaccgcctacgtccagtaccggccgatcagcacttggagcaaccgcctgcaggtgacctactacggcggccgcgactaccggctcaacgaccagaacagcttcgggcggcgcgaggtcagcagctacaccaccgtcgacctgatcagccgctaccaggtcagcaagaaggacacgatcacggtggggatcgagaacctgttcaaccgctactactacccgttgtacagccagctgatgcgcaacagcaataacaccagccgcctgccggctgcgggcatcacgctgaccgcgatgtaccagcaccgctggtaaggctgccgccggacggcgctggcctggtcccttgaccggccgcgccgtttgcgccgggttggcgcaacggccgcggaagcggcacgccggcgcacggcgcctctccccgctcctatatcctcctgcgcaagggagttgatacaaactgtatgcaatttttgtatcacggagtgcttatccctgctattcttgctccccggttgcggcctggaattggatccaggccacgctcgcggcaggcggtctccgcctgcccgtcagcgcgcaatgacagggcccgggggcagccccttccccggcgccagaagaacaagacagtccggaaacctatccggccagacaacaggagacatgaatggcgcccttgctattcaaggtggaagaccgcccccctcggctgacgacgtttttgcttgcgctccagcatctgctggccgccctgggcggcatcattgcggtgccgctggtcattggcggtgcgctgaagctgccgccggaccaggtcattgccctggtgaatgcggccctgcttggctcgggcatcgtcaccatcatccagtgcaagggcattggcccggtgggcatccgcatgccatgcgtgatgggcaccagcttcgcctttgtcggcgcggccatcagcgtgggcgtcgaacacggcgtggctggcatcctgggctcggcgctggcgggttcgctggtgatgatcctgggcagcttcttcatgccggcgatccgcaagctgtttccgcataccgtcaccagcgtggtagtcaccatgatcggcctgtcgctgattccggtggccatcgactgggccgcaggcggccagggcagcagccgctatggcgcacccggcaacctggcgattgccgtcgcggtgctggcgctggtggtcgcggtggtgcagtggggcaagggcatgctgtcggcctcggccattgtggtcggcattgccggcggctacctgctctgcctggcgctgggcctggtcgacttcacccagtttcaccaggcgccgatcatcgcggtgccgcagccgctgcacttcgggatgtcgttcccaatctccggcatcgtcgccatgtcgatcgctttcctggtgaccatcgtcgaatccacgggcacgttcatggcactgggcgcggccacgcagcggccgatttccggtaaatgcctgtcgcgcggcatcctgtgcgatggctttggctcggcctttgcggcactggtgtcgagcccgccgctgtccacctttgcgcagaacgtcggcgtggtttcgctgaccggcgtggccagccgccatgtggtcgcgctgaccggcgtcatgctgctgctggcggggctgttcccggtgctgggcgcgctggtggtgacgattccgcagccggtgctgggcggcgccggcctgatgatgttcgcgatgatcgtgtcgggcgggatccagatgctcagcaccgtcaagttcacgcagcgcaataccctgatcgtggccgtgtcgatcggctgcggcctggcggtgacgttccgcccggaactgctgtccaagctgcctgccttcgtccatgaagtgtttggctccggcatcacggtgggctcgctgtcggcggtgatcctcaacctgctgctgcccggcggcaaggacgagcctgccgaacaagccggccacggcaccgtcggcgaggctgcctgagcagcctgccttgaagcccgcgggcgcgcgctagcgtgcgccgcctcgcgcggccgccccgccccctggcgcgggcgccttcagcagcgggtagggattgatcgccccgcccgcggtgtagacgccatagtgcaggtggggcggcgtgccccgcgcattgccgcttgtgccgacatagcccagcaccgtgccgggcacaatcacgtcgccggcacgcacgccggcgtagtcgtcaagatgggcgtagtaatgcagctggcgcccgggccccatcacccacaccaccttaccgcccagcttgttggtgcccacgcgcgtgacaatgccctcggtagccgacaccaccgggcggccgcgcggcgcaaagatatcgatgccctcatgcttgcgtccgccggagcgcgcgccgtgccaggtatcgcgcagcgcgcccgggacaatgccctggaccggcaccggcaatgccaccggcgcggggcggaccgagagccgggccacgtagatcgcgcgttcgagtggcggccgcaaccagggccaggcgagccagatcaggccgatgctcaccaccagccagatcaggccggcgaaagcgcggggacgggaagacagacgggaggcatgcatatgccttcgacggcagccagccccgcaaattccccgtcaggcgggcctgcgcgccacatcaaacggccccggcaccactttcgaaagcactctccggccgaaccatacgggctggcgccggtcataccctgactgttttcactgcaatgaggagaagcaatggattgtccggtgtgcccgcaaacgcaactcgtgatgtccgaacgccagggcatcgagatcgattactgcccgaaatgccgcggtgtctggctggaccggggcgaactcgacaagatccttgagcgctccgtggcaaccgccccggcacagcaggcggcgccgatgcagcaaatgccgcagcaaaccccgcccccgcgacaggaataccagcgcggccatggcgaccgcgaccggtactatgagcgcgagcagaagcactataagaagaagagcatctggcacgaactgttcgactgaagccggattgctagtgccactggttccagcacaacgtttgtgtgctcgctctcccgcttgcgggagagcaaccgtgtcaagtcggcatgctgtcgagcaattcgaccttgttcttccacacgtcgctggtgcgcagcttgtgcgtcatgtcgatgtcgtgagacttaatgcgggcgtccaaccgcgctatatgctccttcaaactcttaagtgcgactggcggggcagtggcaacccatgccttctcctgcgcgcgcatcgccaccagttggctgcgtctatccagtagatcggcaaactcgcgctgcgcctcgtcgggcagcggccgcgccggcgggcgaatctgcagggcgaagcgtgccagtaccatcgcatcaagccgatcggtcttggccaggatcccgcaggccgaaggcccggcttgatgtcgtttctagctaaaccacccctcaccccggccctctccccatgaggggagagggagaacaccttgcttaggctagttcgggcggctttggcgcacccaaaaccgttggcttgctgtctgggtgctcccagccctcacgccgccttgcgccggcgccgcgaagcttccgcggcagcatcgcgcaactcaggcggcaaggcacgcaattccacggtgaagaaggcacgctcggccggccgcagcgccggcaactgggcggccagccgctccaccgcggcacacgctatggcggtagcgccttgctcgtgggtgaggtaccaggccgattcgagcagcaggttggccagctgcaacggccccagcctgacgtggccggcgtcatggtcttccagcgcgaacgcagccacggcggaccagcgcacgaagcccttggccggtgcgaacggcgcgtggaacggccgcagtgcgtcgacagcgtcggcaacggacagcgggcgctggcggcggaacgcggccatgctgtcgttggccctggctggccggtcggacggcggggtatcgggcccgcagctgccgcgtgcgatgcgcaacaggaagattgcgttccacgccgtgccaccgcccacgccgaaccggtcgcagatccactccgacaagcccagccagcgcatcgcctgccgctgcaccgcgctggcggacaaggtgcgcgcggcatcgaccaggccgtgctgccagaacagccacaggcacaggccgatattggccgcggcatgctgcacggcgtcgacggaatccgcctcgtaggcggcctgcagcgcaccggcgaaggtatccagcgccagctgcgcggcccgcgccgtgccggcatgaccggcgcgcatggcatcggccttgtgcagcagcgcttcgaggttcagcacttcaaagcgcacgcgcgggttgtagcgcaccaccaggcgcagttccggatcggactgcagcccttccaggccggcacgcgcgccgtcgctgtcaccgcgggtatagcgctcccaggcccgcacgatatgcgccatggcgcagaacgcgggcgtcgctgcgccggcctcagccgcctgcaccaggcggtcgacacgcctgagtgccgcccggctctgatcgaggcggccgcagcgccgccacgccaggctttccttgagcaatgacagtgcttgctggaatccgtcgccggcactgcggcctgccgcgcggaaggactcggccacggccgagccgtgcatgcccgcgtggccgtcctgcgcgccgcgcatggcctgggtcagctcgctccagaaggccatgtcgcgcatcacgtagccgacgccgtccggctggcccgccggcgccgcttgcggccccgtgggaaagccaaggcggcgggccagcgcggccgggcccagcgtgcgcccgtccgccacaaagcgcaggtggcgcgcgcacgctgccgtgatccagaacggcccgcggctgcgctgcgccggattggccgcggccgggtcgcgctggcggtcggccccccatccgaccaccacctgccagcgcgcaaagtccgcgaacgcgcgcgacaccagcatgcgcaggttggccgccgtcgggaaggcgctgcgcaccaccgccgcggtgacaccgccctccccggtgcgatgcgcatgccagatgcgcgccagcagccagaccgactggtagcgcgcgggttggccgtcgacccggtacggggccgacacgtcgatatggatcggagcaggcgtggctggcatcaggtaggcagggatcgagtgaaaaccgctggtggcgcccgtcatgttacgcaagttacagccaacgcggttggccttatccggacgctctcctatgctgcgcaccacggtccgggcccggattgccatcccctcaactcttctgcaaagccatgaacaaacatcttgctcgtctgctgacaccgatggcgatcggcttcggcctgctcgcctccaccctgcccgccctggcggcaccgaaagaagtcccgctggatgccgcggcgctgttccgccaggccgatgccaccggcaccatggtgatctacgacctgcggcgcgaccgcatgctgacctacaacaagccgcgtgcggccacgcagtactcgccggcgtcgaccttcaagatcctgaactcgatgatcggcctggagagcggtgccgtggccgacgtcgaccatgacaagctgccgtgggacggcaaggtctggctggtcggcggcaaggctgtcctgcccgacgcctgcaacgctgacgtgccgctgcgcgtcgccttcccgaattcctgcgtgccggcctaccaggcgctggcgcggcgggttggcagcgcggcctaccagcgctacctgaccgcatcgcactatggcaatgccaacagctccggccaggtcgaccgcttctggctgaacggcacgctgcagatctccgcctaccagcagatcgacttcctgaagggcgtggtacagcgcacgctgccgttctccccgaccaccttcaaggccgtggacgacatcactgtgatggagcgcaccgccggctacaccctgcacgccaagaccgggtgggccgattcggccaagcccgcagtgggctggctggtgggctgggttgagcgtggcgacgacgactacctgtttgcactcaatctcgacatggtgcagcccgaacacgccaaggcgcgcatggagattgcgcgcgcggcgctgcggcaggcgggggcgttgccggattgacgcagccgaaggcgcccgccgcacgcgcggccgcctgcagtgactgccctcggatattcacacaggcaatttctcccccgtatttcagatccgtctgatttacctgccgaccccggatcgatagctttggccggccggcatttcccaccgcgtcgcccgacgcaaccattccgtagtgggatctgcccgacgcccatatgcaacgggacagctagacctttcccacaatccggaggtgaaatccaatgagaaaaatggcaatgccggcagccctgctgtcggccatcgcgctgctggccgcctgtggcggcggcggggacgacgcaacgaccacaccggcggcacaaacgccaccgtccgaaaataatccggcaccggcgcctgcaccaaagcctgagccctcgcccgaagcagcaccgcaacctgcacccactggcgagctgccgccgagcctgagcgcaccgcaaccgggctcgacggcaacggtcggcaatggcagcgaaggtctctgggtcggcttcatgaacgccacgctggtcgacaacagcgggaagttcgtgcacgcgagactgacgggcgtgctggcaggcgcgttccagttttctggctcggcctggacgctgggccccggcacgctgtacgaaaccggctttgcctacccggccaccggggccggcaccattaccccggggcagcgctttgacggcaatttcgtcgccacgccaagcaaccctatcaatttgctatccggtacctatgatccgtccaacgcgctagccgtggaccaggctgccatcgccggcaactggaagcaagacggctttgccatgcagatcgatgacgcgggcaacgtcaccggtacctataccagcggcacccgcatttgcgacctgcagggcacggcaacgcttgccaccccgggatcggccaagaacctgtatgcggtcaggatcgttgccgaaaactccacgcagccgggcagcaccggctgcgcgctgtcgaccggcgtgccgcacaacggctttgccgcgatccgcctgatgccggccgacggcagcatcatcgtgagcagcagcacgcgctatgcacgcacgctggtgatggccgccagcaccgggaccggcgggtacttcaccatgcagatgtccaaacaataagcccgcccccccgcaacgcccccgggcggtcctcctgcgggcggaccgccgctaccttcttccttccgagccatggcagtggcttcccgatcacctgacacccaggcggcgcatccgccctccgggtttccccgcggttgagttctgcgcacccatatcatttaattcaacatgaattaattaatagcggacggagacaagatgaccgcatccaaagcgggccgtggcgtgaattccgccagcctgcgcctgtacaacgaacgcgcgctgctgctggcgctgcgccgtgccggcgaggcctccaaggctgacctggcgcgcatggcgcagctgaccaatacggcggtggggagcatcgtgcagaccctgtccgaggaaggtctggtcgaacagtccgggcgccgcacggaaggccagcgcggccagccggccagcctgatccggctgcagcccaagggcgccttcggcattggcgtacggctggaccgcggcagcatcgaggtggtgatggtggactttgccggccatatcctggccagccgcgcccaccagctggtcctgccccaccctgaccaggcgctggcaatggtgcggcacgatattgccgagctgcgcgccctgctcacccccaccgaacagaagcgcctgctgggcatcggcgtggcgcagccctataacctgggtgcctggctgcgcgagctggacgtacagggcgaagccttccaggcaagcttccgcgcctgggaccaggctgacttcccggcaatgctcaacgccgccaccggcttgccggtcttcggcgagaacgacggcaccgccgccgcggtggccgaactgttctacgggcgccaccatgcccggcatttcctctatgtcttccttggccccgccatcggcggcggcgtggtgctcaatggcgactgcgtgcgcggtgtctccggcaatgccggcgatatcgcgatgatgccggtgccgcccagcaccctgccctccgcgccggttgccaccggcaccggcaagcggcgcgacatcctgatctcgcgcgcgtcgctcaacgccctgacccgccacctgcgccaccacggcgtggtggtcaacggccatgccgacctgcagcgccaggtcgagctgggccaccccgcggtcgaggaatggattgccgactgcgtcgatgcgctggcgccggcgctgcagtccgccctcgccgtgctcgacgtgccgctggtgatcttcgatgccgatatcgacggcggcctggtcgccacgctgattgcgcgcctgcagcaggtgctggatgaaagcgcccccgaagcccgcgcgcccgccaccgtggtgcgcggctgctttggcgccaacgccggcgcggtgggtgccgcgtcgctgccgatgttcatgaacttctcgccgcgcgccgaactgctacggggcgcgtctgccatcgttccggaggccggccatgccattgtctgaagcaccgcgtacctcgcccatggcagcgcacctgcatggcggccatgcgggcccagcgccgctgcttgaactgcgcaatatctccaagaccttccccggcgtgaaggcgctcagcaacatggagctgaccgtctacgccggcgaagtccatgccctgatgggcgagaatggcgccggcaaatccacgctgatgaagatcctgtccggcgcctacatcgccgacccgggcggcgagtgccgcatcgccggcaagccggtggccatcgacggcccggccacggcgcgcgcccacggcgtggccgtgatctaccaggagctgagcctggcgcccaacctgagcgtggccgagaatatctacctgggccgccacctgcaccaccgcggcatggtcgaccgcgccgccatggcgcgcgcctgcgaggccacgctggcccggctgggcgcggacttcacgccgcagacgccggtgcatacgctgtcgatcgcgcagcgccagctggtggagatcgcgcgcgcggtgcatttcgagacccgcatcctggtgatggacgagcccaccacgccgctgtccacccgcgagaccgaccgcctgttcgccctgatccgccagctgcgcgccgaaggcatggccatcatctatatcagccaccgtatggcggaaatcgatgagctggccgaccgcgtcaccgtgctgcgcgacggctgctttgtcggcacgctcacgcgcgacgttctgacgcaggcggcgctggtcaagatgatggtcgggcgcgacctgtccggcttctacaccaagacccatggcgcggccgcgccgggcgagatcatgctgtcggtgcgcaatatgtccgatggccggcgcgtgcgcggctgcagcttcgacctgcgcgccggcgaggtgctgggcctggccgggctggtgggcgccgggcgcaccgagctggcgcggctagtcttcggcgccgatgcccgcaccgatggcgccgtgttcgtggccggcacgccgctggccgtcaccggcccgcgccaggcgatcgatgccggcattgcctacctgaccgaagaccgcaagctgcagggcctgttcctggaccagagcgtgcacgagaacatcaacctgatcgtggccgcgcgcgatgcgctgcgcggcgggcgcctgaaccgcgccagcgcgcgccagcgcaccgccgcggcgatccgctcgctcggcatccgcgtggcgcacccgcaggtcaacgtgggatcgctatccggcggcaaccagcagaaggtgatgctgtcgcggctgctggaaacccggccgcgcgtgctgatcctggacgagcccacgcgcggcgtggatatcggcgccaaggccgagatctaccggctcatcaatgagctggcgagctccggcgtggcggtgctgatgatttccagcgaactgcccgaggtggtcggcctgtgcgaccgcgtgctggtgatgcgcgaaggcgagctggccggcgaagtgccgggctgcgccgatgccgccgccatgcaggaacggatcattgcgctggcgaccggcgccggcgagcaaccgcccccggtcctgcactgaaccgctgaattcccgtacaggccggcaaagaacggccgcaccggggcggcatcccgcctcgcagcatcaggagacacatatgcgcaatcccctctcatccacggcccatggcgtcaccgcccaggctgccacgccggtgggccacgccaccggccgcgccaccacgcaggaacgcctgcgcgcgctcggcatgctgccggtgctggtgctgctctgctttggcttcacgctgctgaccgagaacttcgccagcctgcagaacctgtcgatcatcgcccagcaggcgtcgatcaacctggtactggccgcgggcatgacattcgtgatcctgaccgggggcatcgacctgtcggtgggatcgatcctgtcggtgtcggccgtggtggcgatgctggtctcgctgatgccgcaactggcggcgctgagcgtgccggcagcgctgctgtgcggattgctgttcggactggtcaacggtgcgctgatcgccttcatgaagctgccgccgttcatcgtgacgctgggcagcctgaccgcggtgcgcgggctggcgcggctggtcggcaacgacagcacggtctacaacccggatatcccgttcgcatttatcggcaacggcgacctgctgggcatcccctggctggtggtgattgccgttgcggtggtcgcggtgtcgtggctggtgctgcgccgcacggtgctggggctgcagatctacgcggtcggcggcaatgccgaggcggcgcgcctgtcgggcatcaaggtgtgggtggtgcttctgttcgtctatgcggtgtcgggcctgctgtcggggctgggcggcgtgatgtcggcgtcgcggctgtatgcggccaacgggctgcagctggggcagtcctatgagctggatgcgatcgccgcggtgatcctgggcggcaccagctttgtcggcggggtcggatcgattgccggcacgctggtgggtgcgctgatcatcgcggtgctgtccaacgggctgatcctgctgggcgtgtcggatatctggcaatacatcatcaagggcctggtgatcatcggcgcggtcgcgctcgaccgctatcgccagaagggctcggcccgtacctgagctgcggccgcacaggagacagaccgtgatccaacccatcctcaaagcccttgccgcgagcgcgctggcagcgctgtgcgcggcgccggccctggcacaagcgcccgcgcagaccgcgccggcttcagatgtccagtccgtgcagcgcccgctcaagaaggttggcgtgaccctgggttcgctgggcaacccgtattttgtcgcactggcccgcggtgccgaggccgcggccctgcaggccaacccgaaggcaaaggtcaccgtgctgtcggcggactacgacctgaacaagcagttcatgcacatcgacagctttatcgtcgccggcgtcgacctgatcctgatcaacgccgccgacgcccgcgccatcgagccggcggtacgcaaggcgcgcaaggccggcatcgtggtggtggcggtcgatgtggccgccgccggcgccgatgccaccgtgcagaccgacaacacccaggccggcgaactcgcctgcggctttatcgccgaccggctcaagggccgcggcaacgtcatcatccagaacggcccgcccgtatcggcggtgctggaccgggtcaagggctgcaagaccgtgctggcgcgccaccccgatatccgcatcctgtccgacgaccaggatgccaagggctcccgcgaaggcgggctgaacgtaatgcagctgtacctgacgcgctttcccaaggtggatgcggtcttcaccatcaacgacccgcaggccgtgggcgcggacctggccgcgcgccagctcaaccgccgcggcatcgtgattgcctcggtcgacggcgcgcctgacatcgaggcggcattgaaggccgacacgctggtgcaggcctcggccagccaggacccgtgggccattgcccgcaccgctgtgcaactgggcgtgggcatgatgaatggccagcgcccgcccaacccgaccgtgctgctgccgtccacgctggtgacgcgtgccaatgtaggccagtacaagggctgggccgcgccgcggtaagcggcacggccggtccttccaccctcttttccatttgctgattccatgatggctagcccccctgccggcgctccggcacctgaacctgctccagagttcgatttcgtactgttcggcgccaccggcgacctggcgcggcgcaagctgctgccggcactgttcgatgcccacgccgccggttcgctgcatccgcgcgggcgcatcctggcactgggcagccagccgctgtcgcatgacgcctacctggcgatgctaaacgacgaagtgctgccagcgctggccggcaacgccgcggccgcagcgtggcagggctttctcgaccgcatcgtgtacctgcaggtcgatgccaacgccgatgccggcttcggcgcgctggccgagctggtcaatgcgcgcgcggcgccagtggtggtgttctacctggccacggccccgcacctgttcgtcaccatctgcgagcaactggcgcgcgtgggcctgaccggcccgcgcagccgcatcgtgctggaaaaaccgctcgggcacgacctggcctcgtccgaggccatcaacgcggaagtggcgcggcactttgccgaggaccagatctaccggatcgaccactacctgggcaaggagtcggtgcagaacctgatggcggtgcgctttggcaacgtgctgttcgagccgctgtggcggcgcgaatgggtgcgccaggtgcagatcaccatcgccgaagagctgggcgtggagcgccgcggcaacttctatgacggcatcggcgcgctgcgcgacatggtgcagaaccacctgctgcagctgctgtgcatggtggcgatggagccgcccacgagcctgtcggaagacgccatccgcgatgagaagctcaagatcctgaaggcgctgcggccgatccggccggaagacgtggccgaaaaggtggtgcgtggccagtactcccgtggcgccgcgggcggcgacccggtgcccggctatgccagtgaacccggcatcgcgcccgacagccgcaccgagaccttcgtcgctatccgcgccgagatcgccaactggcgctgggccggggtgccgttctacctgcgtaccggcaagcgcatgcagtcgcgcgtggcggagatcgtaatccatttccatgacgtgccctacccgctgttcccgcacccgctgggaatcatgtccggcaaccggctggtgatcacgctgcagcccgaggagagcatccggctgtatttcctgaccaagcagccgggcgacacgcaggcgctgattcccgcgtccctcgacctgcagctgaacactgccgccccacgtgtacggcgcgtgggcgcgtacgagcgcctgctgctcgacgtgatccgcggccggctgggcctgttcgtgcggcgcgatgagcaggtacaggcgtggcgctgggtcgcgcccatcctgaagacgtgggagaactcgcccacgccgcccaagccttacaccgccggcacctggggcccggcagcctccagtgccctgctgtcgcgagacggcatggcctggcatgaagagatgtagcccacgtattgcggagtatctgacatgaccacttccctgcccgcctggcaagccctgcgcgcgcacgccgacaccctgcgcggcacccatatgcgcgactggttcgaaggcccgcgcggcccgctgcgcgccgagcgcttcaccgccgaagcctgcggcctgacgctggactacgccaagaaccgcatcaccgacgaaacgctggcgttgctgttcaccctggctggccaggcgcgcgtggccgagcggcgcgacgccatgttcggcggcgaaccggtcaacaccaccgagcaccgcgcagcactgcatatcgcgctgcgcgcctatccggaggacggctatcgcgcgctcggcgtgcccgtgggcgctgacgtagccacggtgctggcacagatcgagcgctttgccaacgcggtgcgcagtggcgcctggaccgggttcgatggccgcgcgatcaccgacgtcgtcaatatcggcatcggcgggtcggacctgggcccgcgcatggtctgccgcgcgctgagcgatgcacaaaccaccggcccgcgcatgcactttgtcgccaatgtcgacggcagcgatttggcacgcacgctgtcggggctggatgccgccaccacgctggtgatcgtctgctccaagaccttcaccacgctggaaaccatggccaacgcctgcaccgcgcgcgactggttcctgcagcaaggcgtgacccgcgccgggctggcgcgccatttcgtggcggtgtcgaccaaccgcgatgcggtggccgagttcggcatcgacccggccaatatgttcccgttctgggactgggtgggcggacgcttctcgctgtggtccgcagtgggactttcgatcgccgtggccatcggcttcgagcgcttccggcaattgctggacggcgcgcgcgcgatggacctgcatttcgccagcgcaccgcccgagcgcaacctgccgatgatcctgggcctgctcgacgtctggtaccgcagcttcctcggcgccggcagccgctgcgtggcgccctactgcgagccgctggaactgctgccggccttcctgcagcaactggaaatggaaagcaacggcaagtccgtgcggcttgacggcggcgcgctcgatgcgggctcggccgctgtggtatggggcacgaccggcaccaacggccagcacgcctacttccagatgatgcaccagggctcgcagctggttccggtagacttcatcgccacgctggaacccgtgagcgacttgcccggccaccataccaagctgctggccaactgctttgcacagggcgaggcgctgctgcgcgggcgcaccgccgacgaagtgcgcgccgagggcgtgcgcgacgaagcgctggtgccgcacctggtgttcgagggcaaccggcccagcaatacgctgctgctgcagcggctggacccgtaccacctgggcgcgctgctggcgctgtcggaacaccgcaccttcgtgcagggtgcgctgtggcagatcaattcgtttgaccagtggggcgtggaactcggcaagaaactggccgcgccgatccagcgcgaactggaaggcacggccggcgccgccgcgcatgatgcgtcgacggccgcactgatccgccgcgcccaggcagtgcgggcaacggccgcaggctaaccccgcggcaaacaacacaggagacgccgatgtccacgccccttccccgctatgtcgtgttcggagaagccctgaccgacatggtccgccaggccgacggcagctggctgggcctgcccggcggctcatgctggaacgtggcgcgcgtgggcgcccggctgggcattgccaccgcctttgcgggagccgtcagccaggacctgttcggcgatgacctggcccaagccagcgctgacgccggcctggacagccgcttcctgcagcgggtggcgcgctcgccgttgctggcctttgtcgcgtcacgccatccgccgcagtacttctttgtcggcgacgacagcgcggacctgcatttcgatccggcgcgcctgccagagggctggcgccaggcggcagaggtgatccacttcggctccatcagcctggtgcgccagccgctggcggcacggctgtgtgaagaagccacgctggccgcaacggcgggcaagcgcattgccttcgaccccaacttccgggacctgatgcgcgcaccgggctacgccaacgtcctcgcacacatgctgcggctggccagctacgtcaagatctccgacgaagacctggccggactctttcccacgctcgatatcgacgcggcactggcacaggtacgcgccatggcgcccgatgcaaccgtcatgctgacgcgcggcgcgcatggcatgacgttgctcaagggcagtattgtcgtcgagcagcccgcgctcgcagttgatgtggccgacaccgtcggctgtggcgatgcggcgatgggcggctggatggccggcgtgctgtccggcgcggcgggcgaccttgccgcgcaggcgcggctggctgccgccgcggcggcaattgctgcgacccgggccggcgcgtatccgccgcggcgcgaggaagtggaagaattgctggctgcctgaagggccggcgacaggagccgcaagcgatcagcaacggaaaagccggagccagcaaggaaagccctttgggaaagctctgaatatgcgccagatttccagaaaataacctcctcgttacattgtcggtggcaaagtgatgtgctaaccagacgggccttggccacagacaaacgttgttcgggcgtcctatggacgtacgaaactatgcaagcggtcgggctcgctatacttatcacactgtgatagcatacctatgcgcgaccgtagcctcgacacactattggacctggatgggctccgcttcgtcatggatgacgaaagcttgcattgggtgaaaatcgtggtgcgcacctgcgctgtctcgcaggaacgccctcacggactgaggtattcgctgacactgcatgacaggattggctgccgtttgcttggctttgacaatgcgcacggcatcaatgagggatccgggccaggagtgcggacgcgcattgaatacgaccaccagcacatggcggcgggcgttcgattctacggctaccacgatgcttccacgttgctggaagatttctggacagaggtcgacaagatcctgcagcaaaaggagtgaatgatgagcggcaacctcaagattggcatcgcctcactggacgacttcaaggcccgcaccatggcgatcgcccgcggcaaactcaagcccggaaaggatgagcccaaggtctggtttcaatcgctggacgtgctggcaaaggtcctgtccccagccaatcgccaattgcttgcgctgatcgcggaaacgaatcctgaatcgctcgaagagctatcgcaaaaaaccggacgggccgtgtcgaacctgtcgcggacactccgcacgatggagggctatggcttgattcactttgaacaagggccacgccgcaggcttgctccgcgcgttgactacagcggcgtggagcttgagcttgcttttcactagcgtccgctgacatgattggctgcatggcccgcgcgcttgccactacagcaggaacgccggccacagcagctgcccggggttgagcgccgcgaaactgctgctcttgagcaggcggcaatgtccgggcggcaaatactctcaacgacgcgatcaccccgagccatgcgccacgcgcatgcattcatgcggagatatcgctaccgtctgcgccccgccttctcctaacatcagctgcaccatctgcccggccggcctgagacgacaccggcccttgcccccggcagctgtcacagaggaggaaacacccatgcaaaacagcgctgcgccaacgagcgcgccctacacaccggctgcgccagcggcgcccgccatccagcccagccagcgccgccgcgccatcatcgcgacggtgatcggcaatggcctggaatggttcgatttcaccgtctacagcttcttcgcggtcatcatcgcgaagctgttctttcccaccggcgacgacctcagctcgctgctgctggccgtggccaccttcggcgtgggcttcttcatgcgcccggtgggcggcatcgtgctgggcatctacgccgaccgcgtgggccgcaaggcggcactgtcgctgaccatcctgctgatggcgctcggcaccacgctgatcggcattgcgcccacatacgaccagatcggcctcttcgccccgctgctgatcgtggtggcgcgcctgatgcagggcttctccgccggcggcgagatgggcggcgccaccgccttcctgaccgagtacgccccggcgcgccagcgtgcctactactccagctggatccaggccagcatcggcgtggccgtgctgctgggcgcggcggtgggcaccttcgtcaccagttcgctgagcaccgaggcactcaacagctggggctggcgcctgccgttcctgctgggcatcgtgatcggcccggtgggctactacatccgccaccacctcgatgaaaccccgaccttccgcgacaacgccgagcgcgccgattcaccgctcaaggaaatcgtgcaggcctacccgcgcgagaccctggccagcttctcgatggtgatcctgtggacggtgtgcacctatgtgctgctgttctacatgccgacctacgcggtcaaggtgctgaaggtgccgcaggccgatggctttatcgccggcatggcgggcggcagtgccatcatggtgttcgcgccgctggtgggcctgctggccgaccgcatcggccggcgcgtgctgctgagcggctcggcgctgctgatcctggtgctggcgtggccgatgttcgcgtatatcaaccatgcgcccggcctggcttcgctgctggtattccagctggtgttcggcgtgctgatcgccacctataccggcccgatcctggcggcgttctccgaactgttcccggcgcgcgtgctgtcgaccggcctgtcggtggcctacaacttcgcggtgacgatcttcggtggctttgcctcgttcatcatcacctggctgatcgccaccaccggcagcagcatggccccggccatctacgtgatgatcgccgccgccatcagcctggtcggcacccgcttcgtgcgcgaaccttcctacctgcaacaacgctgacatgtcccagagtccccagatccttttccacggcggcgatgtgctcgaacccgccacgggcgagctcctgcgcggccacgatgtcctggttgaaggcgagcgcattgccgcggtcggcccggccatcgatgcccccaacgcacagcgcatcgacgcgcgcggcaagaccgtgatgcccggcctgatcgactgccacgtgcatgtgctggcctcgctggccaacctcggcctgaacgcggtgcagcccaacgtgctggtggcgatccgcgcgctgccgatcatgcagcgcatgctggagcgcggcttcaccaccgtgcgcgatgccggcggcgccgattggggcctgtcgcaggcggttgccaccgggctggtgccggggccgcgcatctttgcgtcgggcaaggcactgttgcagaccggcggccatggtgatttccgtccgcgctcggatgtgctggagccctgttcgtgtgccttccgcgccggtgccatcgcgcgcgtggtggatggcgtcgatgccgtgcgcctagccgtgcgcgaagaaatccagaagggcgccagccagatcaagatcatggcctcgggcggcgtggcctcgcctaccgacccgatcggcaacacccagtacagcgaagacgagatccgcgcgatcgttgccgaagccgaagccgcacagacctatgtgatggcccacgcctacaccggccgcgccatcacgcgcgcggtgcgctgtggcgtgcgcaccatcgagcacggcaacctggtcgaccgcgacagcgccgacgagatgcgcaggcacggcgccttcgtggtgccgacgctggtcacctacgacgcgcttgcgcgcgacggcgcccgcctgggcctgccggccgactccgtggccaagatcgagaccgtgcgccaggccggccgcgactcgctgcgcatctatgccgatgccggcgtgccgatgggctatggctcggacctgctgggcgagatgcacgaccaccaggccgaagagttccgcatccgcgccgatctgctcggcaatctggaagcgatccgctcggccacctcgatcgcggccgccatcctgcagcgcgaaggcgagcttggcaccgtgcgcgccggcgcgctggccgacctgctgctggtcgacggcaatccgctggccgatatcggcctgatcgccggccagggcgagcgcctgagcgtggtgatgcaggccggccgcatccaccgccgcgccggctgatccgggcggcgcgcccctcccgctggcctccatctggatgcgccggcggtctatcatggcggcttctctgaccggaaaccccatgcgcatttccccgctcccgcccctgcccaacctggtcgcgtttgaagccgcgatgcgccacggcagcttcacccgcgccgcggccgaactgcacctgacccaaagcgcgatcagccgccaggtggcccagctggaagactttctcgggcgcaagctctttatccgcgaaccgcgcgcgctgcgcctgaccgtcagtggccagcgctatgccgaggtggtgcagcgcctgctggtgggctgcgccgaagcgaccgaagacgtgatgaaggtgcgcagccataccgccctgacggtggcgtgctccagcggcgtggcggtgctgtggctgacgccgcggctggcctcgttccgcgaggcgcaccccgagatccagctgcgcctgaccgtcaacgacagcctggcgtcgctgtcgccggcggagttcgatatcggcatgtactacctgcgcgagggcccgccgccgggactggcagcacgacggctgtatggcgaggaagtgttcccggtgtgcgcgccgggctacctgaacggccgcacgctggccccggccgcgctggccaatgaaacgctgctgatgctcgacgacggccagcgccagtggatgtcctggcagacctggctggccaaccagggcctgcccgacgccacgctgcgcaacgtgctcacctccaaccagtacccgatcctgctgcagctggccatggaaggccatggcatcgtactgggctggcgccatatgatcgacgcctgcctgcgcgaaggcctgctggtgcgcgccagcgaggccagcgccagcctgggcggcggctactacgcggtgtggccgcgcgaccggatggaaccggccgcggcgcgcgcgttccgcagctggctggtgcggcaggcgacgcctgcaccagcctgatcgctcaggaacccgccttgtagttcgtatccttgacgatcttcgcccaccttgccgcatcctcggcaatggtcgcggcaaactgctccggcgtgccgcccaccacctcatagtcgatcgctgccaggcgctgcttgatctcgggctgcgccaggatgcggttcacctcctggttcagccgcgtgacgatttccttgggcgtgccagccggtgccagcagccccgcccaggaattgaaggccatgccgtcatagccggcctcatgcatggtcggcacgtccggcagcgcgggcgagcgcttggacgcgaacaccgccagcggacgcagcttgccggccttgatcatcgccatgccgttgaacgggtcgatggtcatgtcgacctcgcctgccaccactgcctgcatctgcggcccggtgccgcggtaagacacgctgacgacgtccggcgtgcccgccgcggacttgaaggtggcgccgatcagctcgatcatgctgctgccggccgacaggctcagcggcttggtcttggacttggccagcgccacgaactcctgcacggtcttggccggcaccgacggatggaccaccatcacgaagccgatattgctgatctgcgagatcggcgcaaagctcttcagcggctcatagcccgccttgtacagcaccgggctgagggtctgcgcgccggcgctgttcagcagcagggtgtagccgtccggcgccgcgcgcgccacgatgtccgtgccgatgatgccgttggctccgggacggttttccaccaccaccgactgcttgagcgcttcgcccagcttctgcgaaatcagccgcgccaccacgtctgtggccccgcctggcgcaaacggcaccaccatgcggatcggcttgctgggataggtgtcactccaggccaacgcgggcatcgcgcccagcatggcggcgcacagcatcaggcggcggcgcaagttcggtttcatcgggttgtctcctggacggcggttgtcggaagccggcaccggcatggccagccatggctgcacctgcatttattcatagttgtgaattggattttacccacataaattaccccgtcaaccgagggtatgtgcggacaggcggccgaccgtgacactgacggtaccgaccccgccggaagtgcaggcgaaggacgcggccaacacggtctgcacctgagccgctgggttcaatcatgcaagaagggacgccaaggcgtcccttcttgctactgcttccgaacctccgattggggcggaagatggtcacgtaccggcccttgcgggcagggaaatcggccgatatccggatgctcgaaggcgcgtcacagcattgatcgctaccacggaatcggctggcgatcgcggaagaagccgccggtgggaccatcgtcgggcagcgttgccagccagatcacagtgtcgatgcactgctccggcgagcgcggcgcatcggggccgcccagatcggtgcgacaccagcccgggcacacggagttgaccttggcgccgtgatcggccatctcggcggccaggatgcgcgtgacggcattcagcgccgttttcgagatccggtaagccggcacgccgcggcccatctccgccaattgccccatgcccgaagccaggttgaccacccgggcggcgcggctggcgcgcagcagcggtgccagcgcctgggtggtccgcagcacgccgaacagattggtttccagggtgcggcgcagggtctcgagcggcagttcgagcaggctggtgtgatagtggtcgagcgaaacaccagcgttgttgatcagcacgtccacgcgtccgaagcgttcgctcagccagttggccagtgcggccgccgagccttcttccgtgacgtcaaggcggtggcatgcgatcggatgccccgcgagccggagctctgcctcaagcccagcgaggtccgccggcgtgcgcgccgtggcgacgaccagatggccttcaacagtggccagacggcgcgtggctgcgcggcccaggccgcggctcgcgccggtgatgacggtaatgggttggttggccatgcctgaggtcctcctcgctggcgcagataacccatctatacaccgtcgattacgacttttgttaggcggatatccgtgccggaacaaatcaggaccgaattggttctaatttaagaaatactggtggcgacgatgctcagacttagcaagctgactgactatggcacggtgatcatgacgcacctggcgcgcaacccgggccggatctacagtgcggccgaggtcgccgccgcgatcggtgtggcggttccgacggcaagcaagattctgaagatgctggcaaggcaccacttgctggagtctctgcgcggtgccaatggcggctacctgctggcgcgaccgccgggacagatttcgatcgcacaggtgattgacgccatggaaggcccggccggcatgaccgagtgcagtgtcgctgccggcctgtgtgcgcaggaaggcctgtgcgccatccgcgccaactggcaatcgatcaatcaagtcatctttagcgcactgaatggcgtgacgctggcggatatggcgcaaccggtgttgcacccggtggatatcggcgccttgcgcgcccgacgcgcaaacgggccgcaagctgacattttgtgattcaggtgacagtggcaagcgaaggcaaaccatggcaaccccggcacgcaagctcgatgaactgatcagccacggctataagcatggcttctacaccgccgttgagacggacacggtgccgtgcgggctggatgaggacgtgatccgcatgatctcggccatcaagggcgagccggagttcatgctggagtggcgtctcaaggccttccgccactggctcacgatgtccgagccgcactgggcgacggtgacgcacccgcccatcgactaccaggcaatcgcctactatgccgcgccgcgctcccagaaggccggaccgaagacgctggccgaggtcgatccggagttgctgcgcacctacgaaaagctgggcgtgccgctgcacgagcgcgagctgctggccggcgtggccgtggacgcggtattcgacagcgtctcggtggccaccaccttcaagcagaaactgggcgaactcggcatcatcttctgctcgttttccgaggcggtgcgggagcatccggcgctggtgcagcagtatctcggctcggtcgtgccctataccgacaacttcttcgcctcgctcaactccgccgtgttcagcgacggctcgttctgctatatcccgcccggggtacgctgcccgatggagctgtcgacctacttccgcatcaatgccagcaacaccggccagttcgagcgcaccctgatcatcgccgaccagggcgcttacgtcagctacctggaaggctgcaccgcgccgatgcgcgacgagaaccagctgcatgccgcggtggtggagctgatcgcgctggaagacgcacagatcaagtacgcgaccgtgcagaactggtatccgggcgacaaggacggcaagggcggcatctacaacttcgtcaccaagcgcggtgactgccgcggcgcgcgctcgaagatctcgtggacccaggtggagaccggctccgccatcacctggaagtatccgagcgtgatcctgcagggcgacgactcggtcggcgagttctattcagtcgcgctgaccaaccactaccagcaggccgacaccgggaccaagatgacgcacctcggcaggaacaccaggagcaccatcctttccaagggcatctcggccggccacggccagaatgcttatcgcgggctggtgaagatggccaggagcgcggtcggcgcacgcaactactcgcagtgcgattcgctgctgctgggcgacaaatgcgccgcccataccttcccttatatcgaggtgaagaacgccaccggccaggtcgagcacgaggcctccacctcgcgcatcggcgaggaccagttgttctactgccagagccgcggcgtcagcgcggaggatgcagtctcgatgatcgtgaacggcttttgcaaggaagtattcaaggagctgccgatggaattcgcggtggaagcccagaagctgctgggcgtgagcctggaaggcagtatcggatgaaagaagccagccatgcttgagattcgcaagctgcacgtcagcgtagacgacaagcccatcctgcacggcatcgacctcagcgtgaaggccggcgaggtgcacgccatcatgggcccgaacggttcgggcaagagcaccctggcccacgtactggccgggcgcgaccgctttaccgtgacagagggcgaagtcctctatgacggcaccagcctgcttggcatgccgccggaagagcgcgcccgcgcgggcatcttcctcgccttccagtatccggtggaaatccccggcgtctccaatatctacctgctcaaggcggggctcaacgcgatccgcaagcaccgtggcgagccggagctggacgccatggatttcctcgccctggtcaaggacaaactccagctcatggagatggaccaggacctgctttaccgatcggtgaacgagggcttctccggcggggagaagaagcgcaacgagatcctgcagatggcagtgctggagccgcggctcgccattctcgacgagaccgactccggcctcgacatcgatgcactcaagatcgtcgccaggggcatcgaggccatgcgcagcccgcaacgcgcgattgtgctggtcacgcactaccagcgcctgctcgactacatcgtgccggaccaggtccacgtgcttgcgcaaggccgcatcgccaggtccggcgggccggagctggcgcgcgaactggagcggcacggctatgccgcgatggagtcttcgacatgagcgcaagcggactggagcactatctcgccgagttcgcccgcgtcgaggccgcactgcccggccgccgtctgggctggcttgcgcacgcgcggcggcaggcgctggatcatttcgcccaggccgggttccccacgctgcgccacgaggactggaaatacaccagcgtggccgcactcgagcgaagccgctttgccgtggcactgccgcaggccggcgacagcccggaccccgcggtggcagcccagatcgaggcgcttgccctggccggcgcgcagctgatggtgttcgtcaatggcacgcaccagccgcaatggtcgcgcatcggcaccctgcctgcgggcatcgagctggccagcctcgccgcgacgctggagcgcgcgccggactgcctggaagcgctgctgttgtgtcgcacaagcgactacccgtccggcttcgccgccttgaacatggcgttcatgaccgacggtgcctatatccgcgtggcggccggcaccgtcccggaacaaccgatccacttgctgttccttgccaccgctgccgaactggcaacccatgcgcgcaacctcgtggtggcgcaagccggcagccaggtctgcatcgtggagcaccacgccggcctggatggcctggcctattgcaccaataccatcactgacatcgttgccgagcgtgatgcgcaggtcgaacatcacaagctgcagcaggagagcctcaaggccttccatatcgccggcgtgaacctggaccagcggcagggtagccgctgcgcctccagttcctttgccctgggcggcgccctggcgcgggtcgacatcaatgtcgggctgaatgccgagcataccgagtgttcgctggacgggctgtatatgaccgccgggcggcagcatgtcgaccaccacacccgcgtcgaccacgccagcccgcacagcaagagccgcgagttgtacaagggcgtactggcgggcgcctcgcgcgccgtcttcaacggcaaggtggtagtgcatgccgatgcccagcacagcgatgcgcaccagtccaaccgcaatctgctgctgtccgaccaggccgaggtcgacaccaagccgcaactggagatctatgccgacgacgtcaaatgcggccacggcgccaccgtcggccagctcgacgccgagcagatctactacctgcgctcgcgcgggatggacgatgccgcggcgcgtgcgctgctgacctttgccttcgccgaagaggtcgtcaggcggctcggccctgccccattgcgcacgcggctggaaacgctcttgcgcggcaagctgccggagcctgtgaaggagctgccatgaacacggctgcgcatgaacggatggccgtggagcacgcggtgccggccgccagcctggaggtggagcggctgcggaaggatttcccgatcctgcgccagaccatcaacggcaggccgctggtctatctggacaacgccgccaccacccagaagccgcaaagcgtgatcgattgcgaagcgcattactacgccgcgctcaacgccaatatccaccgcggcgtgcataccctgagccagcgcgccaccgatgcctacgaggccgcgcgcgacgcagtgcgagacctgatcaacgccgccgggcgcgaggaaatcgtgttcgtgcgcggcaccaccgaggccatcaacctggtggcggcaagcttcggccagcgcctgcgcccgggcgacgaggtcctgatcagcgcgatggagcaccactccaatatcgtgccgtggcaactggcgtgccagcgcaccggcgccttgctgcaggtggcgccgatcaacgatgccggcgagctgatgctggagcagttcgcgcgattgctcggcccgcgcaccagactggtcgcgctgacgcacctctccaacgcgcttggcaccgtcaacccggtgcggcacatcatcgagctggcgcatgaccatggcatcccggtgctgatcgatggcgcccaggccgtgccgcacctaaaggtcgacgtgcaggccctcgattgcgatttctacgcgttctccgggcacaagctttacgggcccaccggcgtcggcgtgctctacggcaaggccgcgctgctcgatgccatgccgccttaccagggcggcggggacatgattcgcgaggtcacgttccgcaagaccacatacaacgagctgccctacaagttcgaggcgggcacccccaatatcgccggcgtcatcgcccttggcgccgccatcgggtacgtgcgcgcgctcggcctggaagccatcgccgcccacgagcacgcgctgctcgcttacgccagcgcgcaggcagcaaggatcgccggcctgcgcatgatcggcacggctgccgacagggcgagcatcctctcgttcacgctggacggcatccatccccacgatgtcggcaccatcctcgatcagcacggcgtcgcggtccgtgccggccaccattgcgccatgccggtgatggagcgcttcggcgtgcccgccacggtgcgcgcttccttcgcgctgtacaacacgcgtgaagaggtggatgcactgtttgctgccgtgcgcgcggcacaggaggtattcgcctgatgtctgacctgcgcagcctctaccaggaagtggttgtcgaccacagccgctcgccgcgcaatttcgggcggctggcggcagcgaaccgcagcgccgagggcttcaacccgctgtgcggcgaccggctgacgctgtacctgagaatccgcgacgcggtgatcgaagacgccagcttcgagggctcgggctgcgccatctccactgcctctgcgtcgctgatgacggaagcgctcaaaggcaagaccgaggcgcaggcgcgggccttgttctgcggcttccacgcgctggtcaccggaaagccggggcagtccgaagtgccgatgggaaagctggaagtcctggccggcgtgcgcgagttcccggcgcgcgtgaagtgcgccaccctggcctggcataccatgcaagccgctttggagaacagcgccaggccggtctcaacggagtagaaccccatgagcatgatcgattggctgcacaaggccagggaacacgaagacaggttcgaggctgagccggacagcctcgaggggcgggtgatagcggccttgcgcacggtgtacgaccccgagatcccggtcaatatctacgaccttggcctgatctaccagctatcggtggacgaagccagcggcaaggtcgggatccgcatgacgctgaccgcgccgggctgcccggtggcgcagaccttccccggcgtggtggagagcgcggtgatggaagccagcggggtggacgcggtcgaggtagaactggtgtgggacccgccctggtcgagagaacggatgagcgaggcggcacgcctggaactggggctgctctgagatgagcgagtggatcgatgtcgcccgagccgaggacttcgcgcccggcacttgccgcagcgtcgatatcgatggcgtccaggtcgcggtattcaatgtggatggcaattactacgccatcgaggacctctgctcgcatgaggccgagccgctctgcggcggcgacgtggaaggccaggaagtcgtctgcccgcgccacggctcgcacttttccctgctgacgggcgaggcgctgtccccgcccgcctacgagccggtggcgacgttcccggtccgggtggcggacggcaaggtgcaggtcagggacgagcgcggggaataagcgtacaaccccgatcagtcacttggccgggggcgggtctggacgcactgtcgccaggctgcgccgccttgccatccccgccgatcccatctctaatagtcttgagtaccgtccaggcaaccaacgacggccaggaggcgaaatgcgctgcaccagttgcggtttcgcgaacctcgcgggagccaacttctgtgaggcgtgcggagcaaagcttggccgagcctgccctcagtgtggtgaggaagccactgcagccgcgaagttctgccgcgcttgcggctttgcgctgaccgacgccccggtcggcaccgctgccacgccagcgccgcccgcggccacggccccggtcctctacaccccgccccaccttgccgggcgcatcctggccgaacaggcggcaatggaggccaggggcgagaccgccggcgagcgcaagaccatcaccgcgctgtttgccgacatggccggctcgaccgcgctgacgcaggacctcgaccccgaagacgcgcgccggctgatcgaccccgtggtgacgctgatgatggaagccgtccaccactatgagggctatgtggccaagttcctcggcgacggcatcctggcgctgttcggcgcgccgattgcccacgaggaccatgccttgcgcgcgctctacgcggcgctgcgcatgcaggacgcgatgcatcgccacagcgaccgggtgcggctggagcaaggcatcccgctgcagatccggatcggcgtccataccggcgaagtcgtggtgcgctcgatccgcaaggatgacctgcacaccgactacgatccggtcgggcacaccatccatatcgcttcgcgcatggaggggattgccacgccggcgtcgatccttgtcagcgaatcgacccacaagctcaccgaaggctatttcgagttcacggcgctggggaccacccatgtcaagggcgtgcgggatccgctcgcggtatatgaagtcgtcggcctgggagccttgcgcacgcgcctgcaggtggccgcgcaccgcggcctcgccaggtttgtcgggcgccaggatgagctggcgcacttgcacgcggcgctggggcaggccaaggctggacacgggcgcattgttgcggtggtcggcgaagcgggggtcggcaagtcccggctgttccatgagttcaaggtcagatcgcagcagggctgcctggcgctggagaccttctcggtctcgcacggcaaggcgtttgcctacctgccgctgatcgagatgctgaagagctatttccagatcacggcgcaggacggcgaccgcagctgccgcgaaaaggtgaccggcaggctgctgaccctggaccgttcgttggaagaacacctgccctacctgctctacctgctcggcaccatcgagcccgactcgccgttgccgaccatggacccgaccatccggcgccagcgcaccttcgaggcgattgcgcggctgctggtccgggaaagcctcaaccagccgctggaagtcattttcgaagacctgcaatggctggacggtgagaccgaggccttcctcaatatgctgatcgaccatgtgcccggcgcgcgcatcctgctgctggtgaactaccggccggagtacagccatcgctggaatgcggacgggcattattcgcagctgcagctgcagccgctggggcaggcggaggcgcaggaactgctgaccgcgctgctcggggacgaccgcagcctggtgccgctgaagcggctgatcctcgacaagaccgaaggcaaccccttcttcatggaggaagtggtccagaccctggccgaggaaggcgcgctgctcggccagcccggctgctaccgcatcgagaccgcgccggccctgctccatatccccaccaccgtgcaaggcgtgctggccgcccgtatcgaccggctgccgctggcccagaaggagctgttgcagaccctggccgtgattggcaaggagttcccgctgagcctggtcctgcgcgtgaccggcttgccggaagaccacctgcatccgctgctgtccgacctgcaggctgcggatttcatctacgaacggccggcattccctgaggtcgagtacgccttcaagcacgcgctgacccaggaggtggccggcagctcgctgctcaccgagcggcgcagcgccttgcatgaaagctccgcccaggccatcgaggcgctcttccatggccggctcaaggactactgcagcgaactggcgcaccactacagcaacagcggcaacatcccgaaggcggtcgagtacctgcactgcgccggccagcaagccctgctgcgctcggcgcaggccgaagcgatccggcacctgagcatggccatcgacctgctcaagcggcaacccgacagtgccgaacgcgcgcgccaggaactgacgctgctgcttgcgctcgggccggccctgattgcggcccggggccaggcatcgcccgaagtcgagggcaattaccggcgtgcgctggccttgtgcgagcaaggccagcagacgccctacctgttctcggcacagctggggttgtgggcgttctatcagcttcgtgcgcaatacgaggtctcgctgcctttgggcaagcggctgcttgcgctggccatgaagtcgcagaagcccaagcagctggcggagggccatcgcgcgatcggcgccacgctgttccgccttggcatgctggacgccgcgcgcaagcatgttgaggcggtgctcgcggtgccgcatcctgagcaaccggcgtacgacttcctcacgggctacgggcgcgacccggccgtccacgccaccagcacgctgggctggatcctgtggtaccagggcttggcggaccaggcactggcgcgctgccaggaggcgctggccatggcccgtgcccgcccggatgcgtacaaccttgccctgtgcctggtctttgccgcggaacagcatcaatgccggcacgaagtccggctgacacaggagtacgccgaagccgccatcgccatctcgggcgaacagggttttccgatctacctggcgtggggcaccgtcctgcagggctgggcgatggcggcgctgggcagtcaccaggaaggcgttgcgctgatgcgccagggcgtggccgcctatgaggccaccggcggcagactgggcatgccgaacctgctggccctggttgccgaggcctgcggcaaggcaggccagaccaccgccgcgctggacgtgctcacgcaggcacaagcgctggtggaagagaccggagaacggctggatgaggcaaccgtgtaccggctgcgcgccgagatgctgctgcagctgtcggcagagcgccctgcgccgccggccgcgcaggaggaagccgaagcctgcttgcaccgggccatcacggtcgcccacgaacaaggtgcaaagccgctggagctgcaggccaccctgagcctggcccggctgtggcggcaacaaggcaaggtcgacgcggcgcgtcaagtgctggcgcgggtccacggcagcttcagcgagggcaccgacaccgcggactggcaggaggcccaggcgctgcttgcagcgctggcggccgaccaggccaataccccggagcgcccccacgcatgacctcgacgccaggcctccccctgcaagaccgcttcgtcgcgctgtggacacgtgcgggcggcacgcacgcggccgacgcctatgccgatctcgctcgttgctacggtgagccgacgcggcactaccacaccctcgaccatgtccgtcgctgcctgcaagacctggactgggcgcgcagcgcgataccggataccgacgaggtggaactggcgctctggtgccacgacgtcatctacgtgcccggcgccacggacaacgagcaacgcagcgccgcatggttgcgccattggtcgggcggcagcatcgccgccgccgcgcgcgtggccgcccttatcctggaaaccacccacgccgaagtgccggcaagcctggccggccgcttcaccgccgacatcgacctggcggcgctgggctgcagccgcgcgcgcttccaggaaaatggcgccaacctgcgggccgaacgcaccgacctggacgacgccgcctatgacgccgccgagcgcgccttcctgagtgcgctgctggccagcccgcgcatctacaccaccgacctgttccaggcgcgctacgaggcgcaggcacgcgccaacctgacgtggcggctggcgcagccggcctggcctacaggaactccccgctgatatcgatgctggagcgccggcccacgctgtcgtagtgctgctccagccaccggctcgcttctgcgcggcccttgtcgcgcagcgagcacaggaaattccaatcggcgttgtacttggtggaaacccccagcgcggccatggtctggtccgagcggatcgaatggatccacacctccttcatctccgtgccgtcgagcttgccctgctggatcagcgacgtgacgaaggcaatggcgcgcatctcgcgcatcagcgacgagttgaagctgacctcattgacgcgattcagaatatccgcggccgtggtcggcacgccgtggcgcacgatcgggttgatatggacgatcaccacatcgtgggtctggcagtgatagatcagcgggaaaatcgccgggttgccgacatagccgccatcccagtagtgctggccgtcgatgctgaccgcctggaacagcgtgggcacgcaggccgaggccagcacggcgtcgatgctgagttcctcgggcgggaagatgcgtatccggctggtctcgatattggtcgcacacaggtagagccggatcgggcaatgctcgcgcagtgccgcaaagtcgacctggctgccgagcacgtcgcgcagcggattgaggttgttgggattgaactggtacggcgacagcaggcgcagcgcgatgtcggccatcgcatacatcggcgaatggttcaggcccagcgtatggctgctcttgaaccaaggcagccaccggaacgggttgtagcgctgcgccgagtgcgcgatcgcctcccagaaatcatgcaaggccaggcgcgcgccgtcactgccgccctgcagcagcccgtaggccagcacggtggcgttcatggccccggcgctggtggcgctgacgccttcgatcgccagcctgccgtcctccagcagccggtcgagcacgccccaggtaaaggcgccatgcatgccgccgccctgcagggcgagcgccacaggcttgggttgtgcaggctctggctgcatgcggtcttcccttcagcggcggcaacccgccatgctcaagtgtagggaagaactgtgcgtgcagcgtagtgccggacgcgcgcagtggcacacagcacgtgtgccctggccaggcaggaccagggccgcaagctccgggacgatgcgctggcgcataacgcaactgagccaggctgcggccaggtactacaatggccgcataaaagcagaacagctttccttcgtgcgtcaaatacctcactttccggcccgcaaagccatttcccgcccggcctccctgatcgttgccgccagccttgtcctggtctgcatgatcgcggcccttggtgccctcgccctggtgcagatgcgcagggatgcactggacaatgccagcgaggcctcggccaacctggcgctgacgctggaacgcagcatcacgcgcaacctgcagatccatgagctggcaatcgggggcatagtggaagccatgcacgatcccgcactgctggcgcaaccgccggcgctgcgccagcggctgctgttcgaccgcttgatcaacgccgaagacatgggctcgctgctggtcaccgacgccaacggcacgctggtgttcgactcgcaccagtggccgccgcgcccggtcaacgtttctgaccgcgactacttccaggtccaccgcagcggcgatcacagcggcctgttcctgagccggccgttccagccgcgcctggcgccggagaacaagtccatcggcatcagccggcggctttccgcaccggacggcagctttgccggcaccgtggtcggcaccttgcgcctgaactacttccgcaagctgttcgatggcgtaagccttggcgcgggcggcaccctgacgctgctgcgcacggacggcaccatcatcatgcggcggccctatgaagccgaatcgatcgggcgcgacatctccggcagcccgtcatttgcaccgctgctgcaaggcacgcaaggcacgtttatcggcgtcgcggcagtcgacggggtgcagcggctctacagcttcaggcgcactccgggctttccgctgctggtcgtggtgggacgcgccacccacgacgtgctggcaccctggcacaagcgcgcctgggtgttcggggcgatgatcatcgcgctggacgctgccatcatcgcgctctcggtattgctgtcgcgccaatggcggcgccgtgtcgagatggaagagcacctgcgctggatggtcaacaccgatggcctgaccggccttggcagccgccgtgcgctggacgatgccgccgacgtggaatggcggcgcgcgcgccgccacagccagcctttgtcgctgctgatgctggacgtcgaccacttcaaggaattcaatgaccgctacggccaccaggccggtgacgatgcgctggcagcggtgggcgcctgcatccagcgccaggtgcggcggccgggcgactatgcggggcgctatggcggcgaagagtttgccatcctgctgccgcacaccaacgctgccggcgcggccgccatggcggaggccatccgcgctgccgtccaggccttgcagattccgaatgctgccggtgccgacgggcacttgacggtcagcatcggtgcggtgaccgatgccaacggccccggcaacgaaaaggatttcgccgagctgcgcgcctttctccgtgccggcgacgaagcgctctacctggccaagcgctccgggcgcaattgcgtcgcaaccttcggcgccacggcagcggcgatggcgtcctgagggcccggcgccgcggctacgccagttcgaacccatgccgcgccagcggcagtgaacggatgcgctcgcccgtggcagcaaacagcgcattggccagcgccggcgccagcgtcggcaccgccgattcccccacgccgccgatgcgctcgccgctctgcaccagcacagcctcgaagcgcggcgtctgggccaggcgcagcagtgggtagtcgtggaaattggattgctgcacgcgcccgtcgccaatcgtgatgacgccggacagcgccgcgctcaggccccagatgctggcgccctcaagctggcgctcgaccgtggcggggttgatcacggtgccgcagtcgatagcattgacgatgcggtgcagcgtgatgcgcttgtcccgcaccgacagctccactaccgtcgcgcacagcgagccccatgcctgcgacagcgccacgccctggaagcgccccgccggtgcgccgccccagccggcctgctgcgccagccggcgcagcaaatccgcctggcgcgggcgctcggccagcaggcgcagccggaactgcagcggatcagtcctggcatggtgggccagctcgtcgatgaagctctcggcaaagaacgtgttctgggtatagcccacgccgcgccagaaaccgaccggcacggcggtattgaccatcgcatggcgcacggcgacattgggcagcgcgtaaggcaggtccaccacgccttcgaccgacttgggatcgacgccgcccttgacccggtccgggaaattgcggatgtagatcgatgagcacgccagccgcgcatccagcgcgcggatgcctgccgcgccgggtgccagcacggcgctgaagcgcgccgccgccgcggggcggtagaagtcgtgctggatatcttcctcgcgcgaccagatcagcttgaccggctgtcctgccgctttcgatgccagcgccgcctgcaaaaagacgtcgaactcctcgcgccggccgaagccgccgccgacaaaggtcgaatgcacaacgatgcgttcggccggcaggccgagcacaggcgccagccgatgcgcgatctcgccgcagacctgggtcggcccccagatctcggcacggtcggcgcgaacgtcggccgtggcattcatcggctccatggtcgcgtgcgcgaggtacgggacctcgtattcggcggtataggcctggccggcctgcatgtgcgcatcggggtcgccattgcgcaacgccagcgccgaagcgctccgcgcggcttcccggtagccggccatcaaggcagcatcgccgacgggttcgccttgcggcagtttccagtccggcctgagcgcggccaggcccttgcgcgcggtccagtagctgtcggccagcaccaccacggcgtcgtccaacggcaccacgcgccgcacgccgcgcacggccagcgccggccgggcctcgacacggtgcagcttgccgccgaatgccgggcaggccatcaccgagcccaccagcatgcgcggcaccttgacatcgacgccgaacaccgcagcaccgcgcgtcttcagcggaatgtcgagccggtcagtcgggcggcccagcagcttccagtcgcgcggatccttcagcgccacgctggccgggcgcggcaaggcggcagcccgcgctgccagcgcaccgtagccaagcgtccggccgctggcctcatgacgcaccacgccctgtacggcacggcactccgcgaccggcactttccagccctgcgccgcggcttcgcgcagcatctcgcgcgccgtagcgccgatgcgccgcagcggctcgaacgaccagcgcgcggaggtgctgctggcggtcgcctgtaccttgaacatgcggttgttgtagaccggatcggtgggcgccagctccgcgcgcacctgcttccagtcgcactccagctcttcggcaatcagcatcggcgccgatgtcatcacgccctgccccagctcggcggaaggcaccatgatggtcacgctgccatcggcatcgatgcgcagccacgcgttgatatcgtcgggatcgtgcgcgggcgcatccgcggcctttgccagcggcaggtggaagcccagcacgaacgctgccggcacggcgctggcagcctgcaggaagcggcggcgactggtgtggcattcgctcacgattgcgccctcccgtcggtatcggccatgctctgtcccctggcggcgcgcaggatggcgcgctccacgcgcgggtaggtgccgcagcggcacaggttggtgatgccggcgcgaatgtcttcaggcgcgggctccgggttctccttcagcaaggcgcaggcggccatgatcatgccggactggcagtagccgcactgcggcacctgctcgacaatccacgcacgctgcaccggatgcgaattgtcggccgacaatccctcaatggtcgtaatgtcggcacgtgccacgctgcccacgggcgtgatgcaggcgcgcacggccttgccgtcgacatgcacggtgcaggccccgcacaggccggcaccacagccgaacttggtcccggtatagcccaggtagtcgcgcaatacccacagcaggggcatgtcgcggtcggcatcgacggcatggcgcttgccgttgatcttcagctgcaatttcattgggggtctcctcgtcgcgcaccggcttcgcagtggccggttcggtgcggcccagtatcggccgcgcggcatggcaggacaatcgacttgttttgccatgacctgtgaggcaagatcacagccatgatccgcaggctcccctcgatgcaagtcctccaggcctttgccgccaccgcgcgcacgggcaacatgacgcgcgccggcgatgcgctgtgcgtgacgcacggcgccatcagccgccatatccgtgcgctggaggcacagctgggctgcaccctgttcctgcgcgccggccggcaactggaactgaccgccaccgggcgcgagcttgccgatgaactggaaaatgccttgcgcgcggtcgaactgtcgctggccggtgccaccgagcgccgcgcgcgtgaacgccagtcgctgagcgtcaatgtcagccccgagctggccggcgcctggctggtacccaagctgccgcggttgcgcgaagccctgcccggcctggacctgtctatcgcagccagcaccgacgacccgaacttcgcccgctccgacctcgacgtcagcctgcgctacggtcccgcgcccttcaccggctaccagtgcgtgaagctgctggacgacgacatcatcgcggtatgcagccccgacttcgcgcagcggcacgcgggcatgacggccgcagacgccgcgcacctgccgcggctgcggcacgcgcgctttcgctgggcgcaatggggcgcggcggcgggggtggtgctggacgagccggaagacggcatcgtcttcgactgccgcgcactgctgatcgaagccgccgccagcggcctggggctggcgctgacgcgcgccttgctggcacgggaggctatcgccgcgggcaggctggtgcagccgttggccgccagctttcccgcgagccacaactgctacatcgtctggcgtggggacaatcccaagcaggcgctgatccggcgcttcgcgctgtggctgcgcgacgctgcggtgcaggcgtgaccggcaccgcccagccgctagcccttccctccccgccacacctgcagcagatcccacgccggcgcttccccttccggctgtggcaacgcttgcgccttgaccagcatcgcgccggcctgcgcctgcagcttgtccaggcagcgcgacagcacgcgtgcctcttccgccgtcaggcaggcagccagccgcgtattgaagtcccgcgcctgtgcgaacgctgcacggtagacggcttcgccttgctcggtcagcgtgaaggctgctgcgcgccggtcctgggtacgcgtttcgcggcggaccagaccgcgtttcaccagggcgtggacggcgcggctggccagcaccttgtccaggccggcgctttcggccagttcggtcagccgggtgcctggctgctcgccaaggaaggagatcatgcgccattcgcgccgcgtgacgcccgccctggcgcgcaggtgcagcgccgtggcgcccagcgcgacgcggttcaggtggtagatccggtagttgatgaaatccgccagccgctgcggccgctgcaggcggttgccgctgttgtcgtgtgccatgccacacctgccaattagttgactttgtcaattatatcgacgggtgttagcttgcatcgacgccgctcgccggcggacaacaaactggagacatcgtgagccctcgcaccttccttccccgcttcgccgcgtgcctgctggcggttgccgctgcatggtccgcgcccgccagcgcgcagtcggaccgtccgctgcgcatcctggtgggctacccggccggcggcaccgccgacctcgccgcacgcctggtcggcgacaagctgcgcgagaccctgaaccagaccgtggtcatcgagaacaagcccggcgccggcgggcggctggtgatggactacgcgcgcacgcagccggccgacggaaataccctggtggtggccaactcggcggtcatgaccattgcgccgctggtctaccgcaagctcaactacgatatccagcgcgatttcacgcccgtggcggaggccgccaacttccagctggcgctcgctaccgggccggccagcccggcgcgcacgctgaaggactatgtggcatggctcaaggccggtgcgcagaacaactcctacgcctcgccggcgctgggcagcatcccgcatttcttcgggctgatgatcggcaagcaggttggcatcgacatgctgcacgtccccttcaacggctctgcgccgctgatgagcgcgctggtcggcgggcaggtgccggcttcggtcgacacccttgccgacctgaccgaaatgcaccgcgccggcaagatccgcgtgctggcgacttccggcacccaccgctcggtggcgctgcccgatgtgccgaccttcaccgagcttggctacaagggcatcgaaggcgaaggccgctacggcctgctggcacccgcgggcacgccgcgcccggtgctcgacaagctcaacgccgccatcgtcagggccgtgcagtcgccggacgtgcgcgacaagttcctcaagctggggctggaacccgcaaccggcccggccgacgcctttgccggcgtgctcaaggccgacgccggcaagtgggcaccggtggtcaaggcgtccggctataccggcgactgaaacccggcaaaccgaccatgacgatccgcaataccctcttcatcatgtgcgaccagctgcggcgcgaccacctgggctgctacgggcatccggcgctgcgcacgcgcaatatcgatgcgctggccgcgcgcggcgtgcgcttcgaccgcgccttcgtcacctccggggtctgcggccccagccgcatgagcttctataccggccgccatgtcagcagccacggcgccacctggaaccgcgtgccgctgtcggtcggcgaagtcacgctgggcgaatacctgaagcacagcggccgcgcgctggcgctggcgggcaagacccatgtgatgcccgacaacgccaacctgaagcggctgcacctggatggcggcactgagctggaaacgctgctgcgcagcggccacttcaccgaagtcgaccgccatgacggccaccacgccgagccgcacagcgcctacgccgactggctgcgccagcaaggctacgacagcgcggatccgtggaccgactacgtgatcagcgccgagaacgaacgcggcgagatcgtctccggctggcacatgcgcaacgccggcctgcccgcgcgcgtggccgagccgcattccgagaccgcgtacacggtggaccaggcgatgcggtacatcgccacgcgcggcgacgatccgtgggtgctgcacctgtcgctggtcaagccgcactggccctacctggcgcccgcgccctaccacgccgcgtattcgctcgatgactgcatgccgctgcagcgccacgacgccgagctggaagacccgcacccggtgctgtcggcctaccgcacgcaggaagaatgcgccaacttcatgcgccaggaagtctcggacacggtgcgccccgcctaccagggcctgatccagcagatcgacgaccggctcggccagctctgggaacagctcgaacgcctgggccgctggcaggacactctgatcgtcttcaccgccgaccacggcgatttcctgggcgaccactggctgggcgagaaggagcagttctacgacactgtgcagaacatcccgctgatcgtctacgacccctcgccggcagcggatgccacgcgcggcagcgcgcaggccagcatggtcagcgcggtcgacgtggtgccgacggtgctggacgcactgggcctgccgccggccgaccaccgcgtcgagggccgctcgttgctgggcctgacgcgcgcgggcgagcgtgcctatgccggcagctggcgcgatttcgtcgtatccgagctggactatgcctatcgcggcgctcgcgtggcgctgggccgccatcccggcgagtgccgcgcctggatggtgcgtgacgcgcgctggaaatatgtgcactggcaagggttccggccacagctgttcgacctccagaacgatccgcaggagtatttcgacctgggcagcgaccccggccacgaagccgtgcgcagcaccatgcggttgcggttgctggagtggttctgcacgctcaagccgcgcgtgacggtaaccagccaagaggtagcggccaagaccaatgtgtacaagcaggccggcgtgttctttggcgtgtggtgactacgcccggcgtcatctgcggtccggtgacgtccccctgcccggatggcgtatcctttgaagcgagggatgggggaccggtgttcgcaccggcaaccggagcgatcatgaaacacacctggattcttgtggcggacgaatccctcgcccgcatttttgcctcgcacgcctcaaccgcgccaatggctctggttgaggaaatcactgacgcggcagcacatggcgaccgcgccaacctgcgtcgcgacgcctacggccggcgcggccacgccgccgtacagggcgacgccgggcaccccggtgcccaccaggccgggccgtccaccgtcacatcgtcggccggcgaggatgaactgcaccaggaagcgcagctgtttgcccgccgcgtggcggactaccttgccgatgcgcgcaacaagcagcgctttgactcactggcgctgatcgcggcgccgcgtttcctgggcctgctgcgcaaagccctttccgccggcgtcaccgacctcatcacgaaggaaattggcaaggacttcacccacatgcccaacaacgacctgcaacaacggctcgcggacgaagacatcattcccgcgcgccgcgacgcgcgcgtcgttaccggccgggaccgatagcgaagccgcgcagccgccggtgccaggccaccggcggctgtgcgccggcgtcagcgggcagtgcccgagccgctggctgcaccgctgctgccgctggaggtgccgctcgggctggtcgtgctggtggcgccggacgtgccggtagaagtgcttgagctaggggtgctgctgcggctgcggctctgttcggtgaccgaaccggcgccggacagcgagccagagccggtggtgctgccggtggcggtgcaacccgccaggaagccaattgcgagcagggctgtgccgatgcgtagtgttgttttcatgtcgtcctccatctagcatggttggcggcaagccttgctacacggcgcaggctgccggtgagcgcgctggaacgcagctctgctgcggaagacgcaactgacgtaccagcggcgccatacgacgagcggcgcgggccggcttggcaacgcggcggccggcaatgcgggaaagtgacatgactgcggtccggccacagtaagaagtgcgcgccgcgggtaaaagttaccgcgccggcgcagttcagtatcgactgaagatggcaggcatccgtgctagcgcgtcagtgtccacttgtaggcatagcggtccgggcggaacagcagttcgccgcagaacaacggtgtgtcatcgatatcatgcggcgtgctgcgcaggcgcaacagcggttcgccctcggcaacaccgagccggcgcgccacgtccgcgggcgcggcaacggcggtagcttccatcgccacttccttgaaccggtacccgagccggctttcaaacagcgacatggcgtcgttggtttccaggtcctcctgcaccaggcggcgcatcagcggctcaggacccatcagggtgaaatgcgcgacggccgcgtcatcccagtaccgcacggtggccacgctcagcactttctcgccaggttgaagacgcagcgccgccgccacatgggccggcgcgcgcaccagccgtaccgacgccagcttgccgtaggcgagttggccacgggcgcgtgcggtttcatagaaaccggtcagcgcgccaaggctgggcgtgtctgagggacgagtcacgaaactgcccttgccgttgaccttctcgatcaggccggcgttgtgcagcccggacagggcctggcgcacggtgatccggctgaccgcgaattccgccaccaactccgcctcggacggaagcttggcgcccggcccccatgtgttgctggcgattcgctggcgaatctcgttttcgatctctttgaacctgggcagcgccacttatgttccgccttggcggcggctccgaactgggtggaagggattatacctatcatgacagcctgcggcgtaaccctattgacctgttataacaggtaatggcagtatccgtcgtcaccagatatgcgcgcgcccccgcagatcaccgcatgctggcaactcaggagacacgcaaattgaataccaagacatcacaagacaccgccagcgcggcggcagagttcgactacatcgtgatcggcgcgggatcggcggggtgcgccgtggcggggcgcctggcagaagatccgagtgcgaccgtggcgctgctcgaggccgggccgcatgatcatcacttctcgatctgggcgccggtgggcattgccgcggtggtgcccaaggccggcccgcgcaactacgcctactacacggtaccgcaaccgggcctgaacggccgccgctcctaccagccgcgcgggcgcggcctgggcggcagctcctcgatcaacggcatggtctatatccgcggccatcggcgcgactacgacgactgggccgcgctcggttgccggggctggggcttcgacgacgtcctgccctacttccgccgcagcgagcgcaatcctagcctggccggccaggaacatccgctgcacggcaatgacgggccgctgcacgtgagcgacctgcgctcgcccaatccgtttgcacagcgctttgtccaggcagcgatccaggccggcctgcctcacaacgacgacttcaatggccacagccaggaaggcgtcggcctgtaccaggtgacgcagcgcaacggcgagcgctggaactcggcgcgggcctacctgcacaacggcaatgccgcggacacggcgctcaatggcggccgtcgcggcctggcggtgctgaccgatacgcaagcgctgcgcatcgtgttcgaaggcaggcgcgctgtcggcgtggaagtcgtgcgcggcggggcggtgcagaccctgcgcgcacggcgcgagatcgtggtcagcggcggcaccttcaactcgccgcagttgctgctggcatccggcatcggcccggccgcgcacttgcgcaacttcggcatcgacgtggtccatgaccttccgggcgtgggcgagaacctgcaggaccacctcgacatcatcgtcaacaagcagctgcaaacgaccgagctgttcggcaagaccggccgcggcatgttgcggctggcgcgcgaggtgatgcgctaccggcgcaaccgcaccggcatggtgtcgtccaatatcgccgaggccggtgcgttcctgcgcagccgccccgagctggacatcccggatgtgcagctgcactttgccgtggcgctgctcggcaaccgcaacctgggcaaactgggccacggctactcctgccacgcctgcgtgctgcgtccgaagagccgcggccatgtgcgcctgcgcagcgccgacatgcgcgagacgccggtgatcgatccgcgcttcctgtcggctgaggaagacatggccggcatggtcgcaggcgtgcgggcaatccgccgcatctttgcgcagcctgcgctggcgcagcacggcgggcgcgaaatcctgaccgacgctttcggccccgacagcagcaatgaagccgccatccgcgacttcgtgcgcacgcacgcggacacggtctaccacccggtcggcacctgcaagatgggcgtcgacaacatggcggtagtcgacccggaactacgcgtgcaaggtgtggagggcctgcgcgtcgctgacgcatcgatcatgccgacgctgatcggcggcaacaccaacgcccccgccatcatgatcggcgaaaaggctgcggacctggtcaaggcctcgcaccgctaagccggctatccccctgcattggcaaccactacaccgaggagacaccccatgcaagccactgccgcaaccaccatcagcccggaagcctaccgcgcgctggacaatgaagcctttccctttgccgtgcgccgctgcacgccgacgatcggcgccgatgtcgaaggcatcgatttccgcgagccgctggacgacgacacctatctctcactgcgccgcgcactgctgaagtacaaggtgctgttcttccgcaagcaggcaatcacgccggcccagcacgtggccgtggcgcgccgcttcggcgagctggaagtgcatccgatgtttaccaaccacccggaacatcccgaactggttgtattcgggcgcgatggcacgacgcgcgggcgcgagaacctttaccactcggacgttagttggcgtgagatcccgtcgatgggttcgatgctgcgctgcgtggagtgcccggaggtcggcggcgataccatgtggatcaatatggccgcggcctatgaaaacctgccgcaggacatgaaggcccgcatcgccaacctgaaggccgtgcacgacgccatgccgaccttcggctcggcgctgaacgaagaaaaatacgcggagatgcgcgccaagtatccgccgatggtgcacccggtggtacgcacgcacccggaaaccggcgaaaagatcctgttcgtcaacgaagccttcaccacgcatttcgccaacttcgtcaaggaagcgccatatcgcatcggctccgactaccgcccggccgaactggacctgctgcagtacctgtaccgccaggccgccgcgccagagtaccaggtgcgcctgcgctggcagccggacaccatcgcgctctgggacaaccgctccacgcaacactacgcggtgcaggattacttcccggccgtgcgccatatgaaccgcgccaccatcatcggcgaccgcccggtctgaccgtccccacccaaagccaatccgaggcaaccggcatgaacatcgtcgacaagttctatatcaatggcaagtgggtgcagcccgcagcgggcgcgacccaggccgacatcatcgatcctgccaccgaagcggtcgcgggcacgctcgccatgggcaccgcggcggacgtggaccaggccgtgggcgcggcgcgcgcagccttcccggcctggtcggtgtccacgcgtgaaacacgcatcgccctgcttgagcgcatcatcgccgcctaccaggcgcgcatgggcgacctggcgcaggcggtgcgccaggagatcggcgcaccgattacgctggccaccaatctgcaggccgcgatcggcctggcacagctgcaggcaacgctgcaggcgctgcgcgacttcgagttcgaaaccacccgcggcaacagctgcatcctgcgcgaggccatcggcgtggcggcgctgatcacgccgtggaactggccgctgaaccagatcgcggccaaggtggcgccggcgctggcggcgggttgcaccgtggtgctcaagccatccgagatcgcgccgctggacgcccggatcttcgccgagatcatggatgccgcgggtacgccgccgggtatcttcaacatgatctatggcgagggccgcgcggtgggggccgcgctgtcgtcgcatcgcgacgtcgacatggtgtcgatcaccggctcgacccgcgccggcgtggaagtggccatcagcgccgcgcccacggtcaagcgcgtggcgcaggagctgggcggcaagtcgccgatgatcatcctggacgatgccgacctgcaggcggcggtgaccagcggcgtggcgcagtgcacggtcaacaccggacagacctgcatcgcgccgacgcgcatgctggtgccgcgctcgcgctatgagcaggccgtgcagattgccgccgccgtcgccaacgcggtcaaggtgggcgacccgtccgaccccgaaaccaagatgggcccgatctccaaccgcggccagtacgacaaggtgcagcgcctcatcggggtgggcatcgaggaaggcgcgcgcgtggccgcaggcggccccggccgccccgacgggctgcagcgcggcttctatgcgcgcccgaccatctttgccgacgtgcgcaatgacatgaccatcgcgcgcgaagagatcttcgggccggtgatatgcctgctgccgtacgactcagaagaagaggcggtggcaatcgccaatgacaccgagttcggcctggccgcctacatcgcgtcgtccgacgcggcgcgggcacgcaagctggccgcccgcctgcgcgccggcagcgtgcgcatcaacggcgcgacaatggacctcaccgcaccgttcggcggctacaagacgtccggcaacgggcgtgaatacggccccgaaggcattgccgagttccttgaaaccaagacggtgacaggttgagcctgcgcgctcccgcccgcagtcaccgtaccgcccggtcgtgcagcgccatgctgccggccgggcggtgtcgcttgtaaggcgcctcgctgccgagcttgtctgacatgcgcaggcggcggcgtccgacagccgcagcctgccggccagctatcttcatagcagcgccaggccttttgccagggcgcccgactatgtcgaccattcccgattccgcgccttcttcgctgccccctgcttcgcccgttccgttgcccgccgacggcagcccgcatgccggcgccgacaccgagggcgccgccgggtcccgcacgatggcggagatggctgactcagtcgtgccggccgatgccgtcaccgcctcgctgcaccgtgccagcgtggcactggtggtgctggcgacgctcttttcgctgtacgccgtgcatatcgcacgcgaattcctcattccggtggtgctcgcgatcgtcctggcctacctgctggacccgctggtctgcgcgttgcagcggctgggcctgccgcgcgcgctggcgggcaccgtggtgttgctggccgtgctgagcgccctgctcagcggcgcctacctgctgcaggggcaggtggaatcaatcgtcaacagcctgcccgagacggccagcaagctgtcgcgctcggtcggcgcgctgatgagcggcgacgattccatgtggcagaaggtacgtcgcgccgccaccgtcctcagcggcaccggccagcccccgcccgcacgcggcacgcaggtggtggtggagcaagcgcccgcccagatccacaacatgctgctggccggctcggtcagcatcttcaccatggccggacaggcagtggtagtggtcttcctgctgtacttcctgctgctggccggcgataccttcaagcgcaagttcatcaagatggtcgggcataccatttccgagaagaagatcagcgtgcacatgctggacgaggtcaaccgctccatccgccgttacatgggcatgctgctggtgaccaatacggccctgggcgcctgtacctggctgctgctcaagtggctgggcgtgcacaacgccggcagctgggcaatcgcggccgcggcgctgcacctggtgccctacttcggcgccctggcaatcgcggtctgcctgggggtggtgaccttcatgcagttcggcacgctcggcatggcagccgcggcaacggtcggatcgctgctgatcgccacgctgatcgggtcggtcgtcaccacctggatgaccggccgcatggcgcgcatgaacgcggtggccgtatttgttgcactgctcctgttcacctggctctggggcgtatggggcatgttgctcgccatcccgctgatcaccatcgccaaggtggttgccgatcacattgaagggctcgaagtggtggcagagttccttggcgaatagccgcccgccatcgcccaacggcactatcgatccgccgctatactggaaaagcgaatgctgcaccacagcattcttgctacgccgggatcgtgcggaggaaaacaatgatgtctatatgcgacctgtgcgagtcgcagctggaccggccgggccacgtgccgccgcatcccaggctggtgatgtcggcgaccttgcgcaccgccagcggccagaatgcgtttgtgtaccgttgcgcgcactgcggccagacactgctgctggcctcgcccgatggcgaggcgcccgaccgctggacccggctggatgccgacggatgggactgagcgggatggctcccggctgacttgtgcttgcggttgcgcaaatcgacggcttgcgggtgtgggcataatcgtctcagcagttcccaaccgcaagccatggccaagaaatttccccttcatccccgccaccccgagcgcatctgctggggctgcgacaagtactgctccgtagacgacatgggctgcggcaacggctccagccgcacgcagcacccgattgaactgctcggcgacgactggctggagtacggcgactggggtatcgaagcacctgccggtccgccagagacctcaacctagaccgccggattacaatcgttgtctcaggcttccacaagacgtccggcaccgccggcatccaccgagacaaccatgctgaacctccaggactcctcgctgctgcggcagcagtgctatatcgacggccgctgggtcgacggcgagcgccgcatcgacgtcaccaacccggccaccggcgagcgcgtgggacaggtcccgcaactgggcgccgatgaaacccgccaggccatcgaagccgccaaccgcgcgctgccggcatggcgcgcccgcaccgccaaggagcgctcggcgctgctgcgcaaatggttcgaactgatcatggccaaccaggaagatctggcgcgcatcatgaccgccgaacagggcaagccgatcgccgaagcgcgcggcgaaatcgcctacgcggcctcgtttatcgaatggtttgccgaggaaggcaagcgcgtctatggcgacaccatcccggcgccggtcagcaaccagcgcatagtcgtgaccaaggagccggtgggggtatgcgcagccatcacgccgtggaacttccccgccgccatgatcacgcgcaaggccggcccggccctggcggtaggttgcaccatggtgctcaagccggcatcgcaaaccccgctgacagcgctggcgctggtggccctggccgagcgcgcgggcattccggccggggtgttgtcggtggtgaccggctcggccggcgccatcggcggcgagatgagcagcaacccgctggtgcgcaagctcaccttcaccggatcgaccgaggttggccgcgtgctgatggcccagaccgcgtcgacgatcaagaaggtgtcgatggagctgggcggcaatgcgccctttatcgtgttcgacgatgccgacctggacgcggcggttgaaggcgcgatcgtgtccaagtaccgcaatgccgggcagacctgcgtctgcgccaaccgcatctacgtgcagacgggcgtgtacgaggcgtttgcgcagaagctggtggcggcagtagcggccctgaaggtcggcaacggcatggaagatggcgtgcgcatcggcccgctgatcgacgacaaggccgtggccaaggtggaagagcatatcgccgacgcgctcggcaagggcgcgcgcctgctgcagggcggccagcgccatgcgctggggcattctttcttccagccgaccgtactggccgacgtcggcgccggcatgctggtcgcgcgcgaggaaaccttcggcccgctggcaccgctgttccgcttcgaaaccgaggatgacgtcgtcgccatggccaacgacaccgagtttggcctcgccagctacttctatgcccgcgacctgggccgggtctggcgcgtctccgaacgcctggaatacggcatggtgggcgtcaataccggcctgatctccaacgaggtggcgccgttcggcggcgtcaagcagtctggcgtgggccgcgagggctcgcactacggcatcgaggattacctggtcatcaagtacacctgcatggccggcatctgattgccgcgactcagtacgccgtgtccgcgcacacggcgtgccggggctcggggcagcgcccgccgtgccggcaggtgtcgcgaaagcgcgcgatccggtcatggacacgctgcatctgctccagctgatagctggcgcgcgcagcgctgtaactggcgccgaactcatacagggcgccagccgcggcgcgggatagtccttccaatgcctgcgccagctcccgcccttccacgctgcggtgccggcgcaggcgccaggacaaggcctcctggccctgcgcaagcaggctctgctcaaggtagccaagctgctcggcaacggcctgcgcgccatgcagcgccgacaggtaggcgcacaccaccgccaggcgctggttcatctccccgccgcggcccagcagttcgcgggcgcaggtgcgcaaggtatccgcgtcaaacgcgttgacttcgtcggtggcttcctgtgcataggcggccagcggcagcaccgtgactgccaggcccggcggcagcacgctggtgaaacggctggcgatcgcgtgctgcacggtgcagtccagttcgcagcaggtcggcacagcggcatcgacatagaattccagcgccggcggccgcccgtggtccatcgacaccacggcgcgcgcaggcgggtgcccggccatcgcaagcacctcgaggccggcctcgacacagcgctgctcatcgggctccgcccccagtgcctggacaatatcctgcatctgcagcgtgccagagagttccatgcgggttggcccgggcgggtggtcccccctgcggccgcggtcgagcgccatccgcttccattcgacttgcgtcatcgcattgcccgtcatacagcctccgattttggttccactacccgcgctgcgcggccatcacgatggccgcgtgcatgttctgcagggcatgcagcggctcggcgccggtcagcgcggccaccagcatgctgtcttccagcctgaaacggcacagcaccaggttggagcgcgccagtgccaccatctgctgcggcgtgagcgcggccagcacacggcccactttgcgctcgatgccaagccggaacagggcctcgggctcgttctcgcgcatcagccgctgcaccagcagcaggtaggagaggttcaggtccgtgatttcccgcaggctctcgccgaccaggtcgctggccgtctcttcagccgcggtgccggccggtgttgcatgttccattcggtcctcgcgctggccgggcttggtcattcggctgccacagcctggccaccggccgtgcgcggtgcaagccggcgggcatcgtgcgggccgcgccggggcacctgccgatcgcacgcaggcgcgtgcgcggagatcatcgggcgctcggcgatggcccgcaaggcgggcttgtcgagcagcgagatggtgcggtgcctcacccggatcagcccgcagtccgccagccgcgagaactgccggctgactgtttccagcgtcaggccgatatagctgccgatttcctcccggctcatgcgcagcacgaactccgaggacgagaagccgcgcgccgcaaagccttcagccatccacagcaggaaggtcaccagccgctcttcggcggtcatcagcgccagcatggtctgcagcgcgcgtgcgcgctgcgcctgtccgccgagcgccaggaacagctggttggcaagctccggcatgccggcggcggcgccgcgcagcgcgtccatgccgagcatgcacagcttggtgtcctccagcgcggtggcgtaggacgcatagtgcggatgcgccaggctgtccagcccgaccaggtcgccggggaagtggaagccgaccacttgcgtgcggccgtcttccgtggtcacgtgggtcttgactgtgccgacgcggattgcgtagagcgaggtcacggggtcgcccagcaggtacaggcactggcccttgcgcaggcgcaccgtgcggtggaagccccgggcgccgcccggcaagccccgggcgcctcccaggcagaagcgggccagttggcaatctgcgctgcacggcatgccgtcgcacggcaggtggcattcgtctaactgtgtcattggcgcctctggatggaagagctgaaagcccttgtgcaaccattctatggagccagtttccccagacaatccgcacattctgatttgcagtacagaagcttctgatccggacctgcgctgccggggccaccggcatccccggccattggccctgccaggctgcttgcggggtatccttgctacaagaccagcaccggatgcgctggcgggccacgccggcaggacgccgttcaggacatgccatgacaagaccccccgaggacccgcagcaacccgccggaagcgtacctcgtcccgacgctggcgagccatcgggcgggcgttcgcaagagatccgggccgacctgcccgatgtgccttaccagaccctggtggactccgtgcaggactacgccatcttcacgctcgacgtcggcggccatgtctccagctggaacaagggcgcggcgcgcatcaagggctatgcccgcgaggagatcctgggcaagcatttctcgcagttctacacgccggatgcgatcgcccggagttggccgcaagccgaactgaaggccgcggccgaacagggccggttcgaggacgaggggtggcgcgtgcgcaaggacggcagccgcttctgggccaatgtcgtcatcaccgccctgaaggacgccgagggccggctgatcggcttcgccaaggtcacgcgggacatgaccgagcggcgccgcgccgccgaggccctgcaccagagcgaagaaaccctgcggctgctggtggagggggtcaaggattacgcgatcttcatgctcgatcccggcggccatatcgtcagctggaattccggtgcctcttatatcaagggctaccgccgcgacgagatcatcggccgtcatttctcggtgttctatccgcaggaggatgttgccgctggcaagccgtcacggcacctggcactggcgcagcgcgtcgggcgcgtggaagacgaaggctggcgcgtgcgcaaggatgggtcgctgttctgggccaatgtcaccctgacagcggtatacgacgagtcacgcacgctgcgcggctttgccaaggtgacgcgggacatgagcgagcgccgccgccgcgaagagctggaacgctccagccagcgcatgaatgagttcctggccaccctttcgcatgaactgcgcaatccgctggcgccggtgcacagcgcgctcgcggcgatgcggctggcgccggaggatgcggtgctggcaaaccggagcctggccatgatcgagcgccaggtgacccacctgagccggttggtggacgacctgctcgacatcgggcgcatcacctccggccggatcgagctgcgcatggagccggtcgagttcaacgagatcatcgcgctcggcgtcgaggcagcgcagccggcgctggatgccaagtcgcagtgcgtcgaagtgcggacccatgccggctcgatcccaatgcgtgccgacaagacgcggctggtgcaggtcatgcagaacctggtgctcaatgcatcgaaattctcgccgcccggctcgtcggtgacgatcgccaccaccatccagaaccgcacactgcaggtccaggtaatggaccagggctgtggcatcgggccccaggccatcgacgagatcttcaacctgttcatgcaggaaagccgtccgggcaccgacttgcatggcgggctgggcatcggcctgtcgctgtgccggtcactggttgagctgcatggcggcaccatctctgccgccagtgccggggcgggacaaggcagcaccttcacgctgcggctgccgctgacggcctcgcacaaggaggacccccggccaggagccgcactgccggcccagggtccggtcgcacccgagttgcaggcgcagcgcatcctgctggtcgacgacaaccgcgacgccgccgacagcctggccatgctgctcgagatatgcggccacgaggtgaccattgcctacgacggcgccgaggccctgcatgtggcgccccgctgccgcccgcatatcgcgctgatcgacctggccatgcccggcatggacggcttcgaagtggtgcgcgccatgcgcctcgtggccggcaccgagctgacgcgcttcgtggcgctgaccggcttcgcccagccggcggaccggcagcgtaccgaggccgccggcttcgacgcacacctggtcaagccggtggagctggaaacgctgttcggcaccatcgcccggctgcgcccgccggaatgacccgttccggcaccgaacccgaccttcgccaattccaaacacgcgcctgccggcgctgcgacacactgacggccattccatcgcaacagatcacagaaaggagacagcgatgcagggttggatcaggcgtgcagccgcggggctggtatttgcgttcgcggccacggccgccggtaccgcgctggcggactatcccgacaagccggtgcggctggtggtgccctttccgcccggcggcgccaccgacctgctggcgcgcgagatcggcaacgcactgtcggcgcggctgcaccagccggtggtgatcgacaaccggcccggcgccggcggcaacctggcggccatcgcggtggcgcgggccccggccgacggctatacgctgctgttcggcaccttcggctcgctggcggtcaacaaaagcctctatgacaagcctggctacgatccgctgaaggacttcgcgccggtggcttcggtcgcctacctgcccaacgtgctggtggtgcatcccagcgtgccggcgcgcaccgtgcaggagctgctggcgctggcgcgcaaggagccgggcaagctgacctatggctcgttcggcaacggctcgtcgtcgcacctggcgggcgagctcttcacccacctggcggctgtcaatatcacgcacattccgtacaagggcagcgccgcgtcgatgaccgacctgatcggcgggcgcatcaccatgatgttcgacagcgtctcgaccgcgctgccgtatatccgcgacaaccgcgtgcgcgcgctggcggtgacgacgcagaaaccctctgaccagctcccaggcgtgcccacgctggccgccgccggcgtgcccggctacgagctgaccgcgtggtttggcgtggccgcgccggccggcacgcccaaggcagtgatcgaccgcctcaacggcgagatcgtggcggcgctgaagcagcctgacctggccgccaggctggccagccagggcaccgtgcccttccccgccacgccggcgcagttcggcagctatatccgcgcgcagttcgagaagtgggacagcctgatcaagtcggccaacatcaagctggacaactgatagcctgagcccaggccgtgtccggcgcgccgaagcgccacgacagccggcgcgccgcctgccgcaccagcgcggcagtggcgcccgcggtgctgctgtcaaagctgccgctcgagcccatcacggcgatcaccagcgccaggctgccggtgtggtcgaataccggcgccgccagcgtgtcgatgcccggcaccgggtggctcagcgcattgtcgagccgggccgcgcgcacctgcgccaggcgcccggcgtaggccggcgccagcttgccgccgggttcaagcacttcggccgcggcagcgccggccatgcgcaaatcgtccttttccagcaagcccgccagcacgttggctggcaggtacgcagcggcggtgcggccaatcgcggtatggaccagcgacagcaccgtgcccacgcgcaggcttacgtgctggggccgcgccgattcctccagccggaccaccgtgggccccagcggccccagcactgccatggccacgctcaggccggtggcgccggccagctcgatcacctccggttccgcctcacgcgtcggcgacagccgctgcagcgcgatcagccccagttccagtcccagcggtccgcacaggtagttgcccgcggcatcgcgcgccagcaggccggtcttctgcaggctgaccagatgcgggaacgccttggccggcggcatgcccgcggccagcgccaggtcgcgcagcgccagcggccggccggcagccaccagcgccaccagcagctggccggtgctgtccagcgactggatgccgcgctgcggcttgccgccttccaggtcttgctgggcttcggtcgcgctgctcatgccaggcgcccctcttcatcgcgcagcgcggcgccgatgtccgccgccgcggccagcagggcctgcgccgcagcgccgcgccagtccacctcgatggcaccggtcgatcccaccagcgtcagcaccagccgcagcacgccagcggcgtccagcaccggcacgctgaggctgctgacagccgggctgggcgtgtcgatgctgcgctcgatgccgcgcgctcggatttctcccaggctggcgctgaaggcggccaggtcggactcggccgcgcccggctgctgtgcgcgccacagcggctgccacagtgccggcggctggaaggcacagaacacgcgcccggtggccgtggcggccagtgccatcaccgtgcccacgtgcaggttgacatgcagcggcgcgctggccggcacatagcgcacgatggtcgggccctgcggcccggcaatgctgattgccacgctgaatccggacgactgcgccagcgcatccacccggggctgcgcggcgcgccaggcggcgtcctgctccaggtgcagcatgcccagctgcagcgacagcggcccgggctcgtagcggccggagaggtggtcgcgcttgatcagacccagccgcgtcaggctgaccaggtaggcatgcgcctgggccggcgccagctgcgccgcctcggccagcgcggccagcggcattggcgcgcgcgcgaccgccagcgccaccagcaggcgcccgcccacctccacgctctggatgccgcgctgcgccttgtcggcacgcgcagcgggctcgtccgcctgcgttcctgcttccccagccttgcgcctggccattgccatcctgtgtgatcggaaaacccggatattaatcgaacgcctcccgttgccgtgtgcacgggggtttacccgaacaaactccacctgcctccgatggcgttcgcggcatgcctcaattatttgtcataggctaatcatttcgctattgattaattttttaacgtttcctaagattgcactaccccgtccgaacacggcgacccacgccgtcaggcatccatagaaacggggcgagacagcccgcggccagcgcaacgcagccatcgtgccggtgccgtctcgcctccccacacaaaggaaagacgccatgtccaaggcattcgcatcgcaggccgacctggaagccaagcaggtcaccttcacccaactgtcagagaacgcctgggcctacaccgccgaaggcgatcccaattcgggcgtggtcatcggcgacgacggcgtactgatcgtcgacaccaccgccacgccggccatggcgcaggacctgatcgcccgcatccgcaccatcaccgacaagcccatcaagtacgtggtgctgtcgcactaccacgcggtgcgcgtgctgggcgcgtcggcctacttcgcggaaggcgcgcagcaggtcatcgccagccgcggcacctacgagatgatcgtcgagcgcggcgaggccgacatgaagtccgagatcgagcgcttcccgcgcctgttcgccggcgtcgagaccgtgcccggcctgacctggccgacgctggtgttcgagaaggaaatcacgctgttcctgggcaagctggaagtgcgcatcgcccacctgggctcgggccataccaagggcgacaccgtggtctggctgccgcagcagaaggtgctgttctccggcgacctggtcgagtacgacgccgcctgctactgcggcgacgcccagctggaagactggccggccacgctggacgcgctgcaggcactcaagccggaaaagctggtgcccggccgcggccccgcgctgaccacgccggaggaagtggacaagggtatcgcctacaccaaggacttcgtcaccacgctgttccaggccggcaaggaagccgtggccgagaagctcgacctgaaggccgcgatggcgcacacccggcgcgcgatggaccccaagtttggccaggtctttatctacgagcactgcctgcccttcgacgtctcgcgcgcctatgacgaggccagcggcgtccgccacccgcgcatctggacggcccagcgcgacaaggaaatgtgggccgcactgcaggactgacctccaaaaagaataagtcgggcaacaagctatggatggagacacaggcatgagcagcatcgattaccagcggctgtcgttcgagtaccagccctgcgccgagcaacagaaaggggccgatccggccgtccacccggtcgtcgtggtcggcgccgggccggtcggcctggccaccgccatcgacctggcgcagcgcggcgtggccgtggtgctggtggatgacgactgcacgctgtccaccggatcgcgagcaatctgtttttccaagcgcacgctggatatcttcgaccggcttggctgcggcgagcgcatggtcgacaagggcgtgcgctggcacgtcggcaaggtgttcctgcgcgaccagcaggtctacagcttcgacctgctgcccgagagcggccaccgccgccctgccttcatcaacctgcagcagtactacctcgaaggctacctgctggagcgcgcgcaggcgctgcccaatatcgagatccgctggcgcaacagggtggtcgggctggaacagcgcggcacgtccgaggacggcgtgatactgaccatcgagacgcctgacggcagctacccgctggcggcacgctacgtggtggccgccgacggttcgcgcagcccgatgcgcaagctgctgggcctggacagcaagggccgcaccttccacgaccgcttcctgattgccgacgtgaagatggaagcggatttcccgagcgagcgctggttctggttcgacccgcccttccacccgaaccagtcggtgctgctgcaccgccagccggacaacgtctggcgcatcgacttccagctcggctgggacgccgacccggagctggagaaaacgccggagcgcgtgatcccgcgggtgcaggcgctgctgggcaaggacgtgaagttcgagctggaatgggtcagcgtctatacgttctcctgccttcgcatggacagtttccgccacggcaatatcctgttcgccggcgatgccgcgcatggcgtgtcgccgttcggcgcgcgtggcgccaacagcggcatccaggacgccgagaacctggcctggaagctggcctatgtgctgcagggccatgcctgcgacaagctgctggacacctacgccagcgagcgcgaatacgccgccgacgagaacctgcgcaactccacacgttccaccgacttcatcacgcccaagagcgcggtcagccgcgtgttccgcgatgcggtgctgaccctgtccaggcgccatgcgtttgcgcgcaccctggtcaacagcgggcggctgtcggtgcccgcggtgctgcaggattcgccgctgaacaccgctgacgatgcccaggactatgcctgcaagctggtgcctggcgcggtctgctgcgacgcgccggtatccggcgcgcagggcgcgggctggctgctgtcgcacctgggcggggacttcacggtgctggtgttcggcagccctgacaccatcgatgcagccacgctcgccggcctcgccgcgctgaaagacagcggcgtgccgctgcggctggtctacgtgaccgacgccgcgcagccggcggtgacctgcaccaatgccaccgtgctgcgcgacgacgagggcctggccgccgcgcgctacggtgccacgcccggcacctgctacctggtccgcccggaccagcatgtctgcgcccgctggcaccaccccgacccggccgcgatccgcgccgcgctggcgcgtgccaccggtgccgacctgcgcgccccgcagcccggccgcatggccgcctgagaccggccagacctgcaccgcggagactcccatgcccaatacgctcaacacccaacccaacctggcgcggcccgacgacttctacgaagcgctgatcgagatgcaccgcgacctcgacgaggcaaaaagccaggccgccaatgcgcagctgatcctgctgctggccaaccatatcggcgaccacgatgtgctcctggccgccatggccgccgcgcgcgaaggcgtgaccgaaatgccggccaccacgccagcctgacctgacacaggcgcggtaccgccgcgcctgtcctgttcttttcccggcaccatcgcgggccaacgcgcgcaagacgctgcccactggcggaaccctccggctgcccgccgccgcagccaccaccgtacggagacaacgttcatgagccatccggtctcaggggatctttcgtccctatccagcctgacgtcccccaccctgcctcccgcagcactggctgcgcacgatgaggatgcgctctaccgcaaggtctggctgcgcatcatcccgttcctgttcgtctgctacgtggtgtcgttcctggaccgcatcaacatcggcttcgcccagttgcagatgaagcaggacctgggcttcagcgacgccatgtacggcctgggcgccgcggtcttctacgtcggctacgtgctgtgcgaagtgcccagcaacatgctgctggcgcgctttggcgcacggcgcacgttcacgcgcatcatggtgctgtggggcctggcctcggtggcgatgatgggcgtctccaccccggcgcagttctatacgctgcgcttcctgctgggcgtgttcgaagccggcttcttccccggcatcgtgctctacctgacctactggttcccggcgcgccgccgcgccgcggtgatggcgatcttctttgccggcgtggcggtggcgggtgtgctgggcgggctggtgtccggctggatcatgcgcgacatggccggcgtgctcgggctgcagggctggaagtggatgtttgcgatcgagggcgcgcccgcggtgctgctgggcctgctggccgcgcgctgcctggttgatggcccgcagcaggccagctggctgaccgacggcgaacgtgcccacctggcgcgcgacacggccgcgcaagcacatgccggcggccattcgctgcacgcgttgcggcaggttctgcgcaacccgcgcgtgtacctgttcgcgtttatctatttttcgctgacctgtggttcgctggcgctgagcttctggatgccgctgatgatccgcgacttcggcatcaccgacgtgatgtcggtcagcctgtattcggtggtacccaatgccgtgggcgcggtcggcctgctcctgatcgcgcgccactccgaccgcaccggcgagcgccaccgccacttcctgctgtgcacggcaggcggcgcgctggccctggcggcgctgaccctgcacctgcccagcctggcgctgatgctggccatcctgtcggtggccgcggtgctgatctttgccgcgctgccggtgttctggtcgctgccgcccagctacctgccgggcgcgggcacggccgccggcatcgccttcatcagcagcatcggcatcaccagcggcatcgtcagcccgtgggtgattggacagatcaagacccggaccggcagcctggaccatgccctctacctgctggcggcgctgctgctggccagcggcctggccatgtggctgggtgtgccaaggcagcccgcgcggccggcctgaaccgggccgcaggcgtcttcaaaaccggaatgtccgcacccacggggtgcagcgttcagtgggatcggccgcaggggatgacggaggcgatttcctcgcgcatcacctcgaccacgtcgtcgatctccagcccttcggcggtgaccagcacgtcctgtccgcggccgatcgcgtagaccacgccgcgccagcggccgggctcgacggcctcgcacaggcggatattgaattcggtgtcctgatcctggctatacaccgtcaccaggtcgcccacctggggagtgcgcaccgcttctccgtcgaacgcccgggccaccacggtcaccggcgactgcgtcagccccctggcaaatcttgcacgcatggtccgctcctctttttgcgatccaagtccagcttacaagaggcccgacaaataaccagggatttccatcgaaaagtggaacccggtgccctttgcggctgtcagacggcgccggatagacagcgcgcgcagatgcgccacaatgaaagcaccgatcatcgaggagacccgacatgggcagcaacatacacgtcgtaccgcacgacgaaggctgggatgtgatccacgagggtgcgcgctatgcggaatcgcaccacgccacccaggaagaagcggttgcggccggcaccacgaaggcgcaaagcgagcacgtcgagttgctgatccacggccgcgacgggcagatccgctcgcgcagcagcttcggccacgacccgcgcaccattccgggctgatcgccggccactcgtcaggccccgctgaagactccggcgctgctaatcccggataccgatgcgagatgccacaccaccgggctgccccccgcgccgccgccgcgattgcggccgcggcggttccattgccgcccatcgacgacccggcggcaagcccgttccgcggtccgtttgccaatgccaccggcgtgctggccgatttgctggcccgacaccgcgtggtgctcctgggcgaaagtacgcacggcaccgccgagttctatcatgcccgcgctgccctgacagcgcacctggtggcccggcacggcttccgcatcatcgcggtcgaggcagactggccagatgccgcggcagtcgaccgccacgtgcgcggccgcccgccacagccggccgaatcgcccggcgcagcctttacacgcttcccggtctggatgtggcgcaacctggaggtggcgcgctttatccgctggctgcacacgcacaatgaaaccctggcgcctgcgcagcgcactggattcttcggcctcgatatctacagcctgcgcgcttccatggctgcagtgctggcctacctggagggcgtagatccacaggccgcccgagcggcgcgcgagcgctatggctgcctggaaccgtggggccgggatccggcgcgctatgggcgtgccgtgctgcacggcacgcatgccgactgcgaggatgccgtcgtcgcacagctgcaggcgctgctggacaaacggctggcctatgcccgggcgggtcacgaggactttctcgatgccgcgcagaacgcgcgcctggtcgcttcagccgagcgctactaccgcgtgatgtatcacggcagcgacgacagctggaacctgcgcgacacacatatgtttgaaaccctggcgcatctgctgcaggcgcatggcccgcaagcgcgcgcggtggtatgggcgcacaactcgcatatcggggatgcttcgcagaccgagatgggcgccagccaggggcagctgagtatcggccagctgtgccgcgagtccttcggcgacgacgccgcgctggttggcttgagcacttacgacggcaccgtcgccgcggcgacatcgtgggacggcccgatggaaatcaagcaagtgcgccctgcccgtgccgacagctacgagcatctgttccatgcggccggccatgcgcaagcctggatcgacctgcggggtccgtccggcggcgccaacggcggcgtgcaggccgaagtgcgtcagctgctgatgccggcacggcaagagcgctttatcggggtgatctaccgccccgagaccgaactgcagagccactatgcgcgcgccacgctgccgcggcaattcgatctgctgttgtggttcgaccgtacgcgcgcggttccggcgctgccggcggagcccgcgccgggcgcgccggagacctggccttacgggctctgaagtggccgccttgtcgcttgcacggacgctcatccgccggtgcggtccggcgcaacctggatgcgattgacgatctcgcgcacaccgtcacagccgcggacgcaggcttcgactgcatcgcagtcggcctgcgcgccgatcgcgccgcgcagcgtcacgcggccttgcgccacgtccacggcaacctcgctcacgtcgaggccggcgtcccacaggcgcgagcacagggccgcctgcagcgccatatccgctgccgtcgcggcattgccacggtgattggctgggttcggggaaccggtcatgcgcgcactctcccgtccgtgggaacaacgcctcagtaggtacgcatgccgtggcccggatgcgcttgcgctgcgccagtgcgcgccacgtgcaagtggttgaccagatccttcacgccgaaaacctcgtcggcaatatcctcgatccggtacttctgcagccggtccggcacactgccctccagcgtcaccacgccctgctcgacccggacttcgacatcgttgaggtccagccgcgcgctgcgcgagagctgctcgcacaggtcttcgagaatgcgctcgtccgtgcgctggtaattgcgcggccccaccggacgcgcccgctgcggcccgccccggtagagatccatgcgctcgttgtagccggtgaactggcggtaaggatcggtctggccccgggcgcgcggcgccggcgcgtccggcggcaagcgctccggccgccattcccacgccccgcggcgcccgccagactcgtccgggtccaccggctcgtcataatcgtagaccccgtaggcgcccacgtagtgactgcgcatatcggcttcaggcaccgcgctctcgtgccatggctggccgcgccagttgtctctgcgatccatcgtcgtctccgcttgccccgattcgtcagtcagtcagcgtgccgctacttctgccgcggcggcaccagcccgcggtccggcgcgcgcagttcgcccttgcgcaactgccgcaccgcgcacgccagcgcgcgcgccacgttgtccacttcgccctgcacgccagtgtcttggtccagtgccacgtggctggtggcatagggctcgtagtagccgatataccggtccagccgcgcctgcgggcccgcgtcgatcaggcccatccagtcgagccagtcggccagcgcgcggcgcacgccctcgatgccggccacgtcgccgtgcaccaccagcccgtaggcgcgcccggacagatgcttgggatagtcccagccggacagctccatcgccttggcgcgcaccacgtccttgccatgcgtggtggtggggtcgggattgccgccgtcggcgcagaccagccggtccatcatcagcttcagcgggctggcggcctggtaccagtacaccggcgtcacgatcagcacgccgtggcaggccgcccagcgcggatagatttcgttcatccagtcgttgacctggcccagcgcatggttgggatagcagctgcacggccagtggcacaacggcattgcggtcgacacgcacgccttgcacggatggatgcgcaggtcggcatctgaggcgaggtggctcaggtcgagcaggtcgacctcgatgccgtccgcctccagccgttcccgtgcgcgcccggccaggcgccaggatttcgacacctcgcccgggcaggtgtagtcgttgcgcgccgcggcgcacaccagcaacacgcgcgacggtgtggcgggatctgcctggcgctgctgtgcgctgcgcacggcctcgctggcggcgcgccactcgtcggagagctcgtagtccggatcggcatagcctggcccggccttatgcgtgcggggtgccttgcggccttcctgataggcatcccaggcaatgtgttcgaggcggtccagcgcctcatcctcctgccggtatgcgggatccgcgaagcgcgcaagaaagcgctggcggaacgtgtcgcgcgccaggggagtggtcacctggcccttgcgcacatcctccgggttgccgggatggcgcggcgcacgcggcgcatcctgcgatggccgggctggcttgggcgggtgctcgggcatgacggtctccgtacgggacgcatgtcccgcagacatgcaagatgagcgccatcccccgcgggcatgcattgcgcgccgcgccctgcgtggcggccggccgcgcgtgcaattcgttcgttgccttgtaagaaatgcggtctcggccggcggctacgggcttgcctgcggcgtccggtactgctgctgcagcacgcgaaacaactcgtggctgacctgcaccccacggtactggcggcgcaccagggcgcgcaggcgcgggcccagcacctgcgtgcgcagcgcccgcgcatagcgtcgctgcacggcgtgttcacgcttgctgaccgcctgcaggatggaccggtccgagccgtgcttgccgatcgcgcttccggccgacgcagccggggctgccgtcatgtcgggcagctgccccaggtcaagcaggcacgcctgcagctcctgcgccgcttgcgcaaacgcattggcgcggctggtgagcagcgatttcaggtggggattggccgcggccagcgctgcgacgcggcagccaagctcgccttcgcgcgatgccgcaatcagcgcattgagcaacaggatcttcttcttcgccatgacacacctgccctggtccgcgcgcggacccgtgaagtcaccgatcggggccggctgccgccggcggttgctcgctcgcgccggacgtgcgccgcacgccgggctcgtgcaaggatagcggctcgtcccgcgcgccgccagtggccgcaagcgcgcgctgcgaggcgggcggccacgccttgcgggcctcgcgcatgccgcgcaggttcatcgcgatcagcgccagctgcaggaccaccagcgcattggcgccgccgtgccagccccaggcaatccacagcacgttgctggcaagaaagacccagaagccggcgcgccggcgcgcgctccggcgtgagccgaccagccaggtggccaccaccgtcaccaccatcgccggccattgcgctgcctccagccaccagtccatgcgtctccttccgcggccttcccaccgtgccgggaacaacacgcgctgccagacagcggcaagaagcgtaccggctggacaccgcgcccgcatcggccccattgccctgcgcgttctttccatcggcacggcgcgcgccggtagtttttacaagcagtaaggcatcgcgcacataagatgccgcggcgcttgcccttgaggtgccttggctgggcgcgcaattggagactggccgggcgcgctggcacgcacttcgcatggctgtgccatcccgccggctggccgcaaggcgccggagcgggattttgttgctccgtcggagcgaaacaccgggaggattttgtgcggatctgccagatcgacctgaccggaacgcccgatgccgatgaacacgcgctccagcgcgtggcggcactgggcttcgaccacgtactgatcggcggctggccgcacctgcccggcgaagacgctttcgcggcttgcgcccggcacgggctggccccgctgctcgacatctcactggaccgctatgcggtcgaccccgccgatggcaccgggccagcacccgaccctggctggatcgacagtgcgctcccagccttcgccccacacgagaccgacagccacatccccggcgcgcgcctgcgctggcatgaccagcaagcggccgaggcgctggtgcagtggtgggcggcccggctgcgccaggcctgggtggcaggcgcggcgggcttctgctgccgtgcgccggcacgcgtgcacggcaggcattgggccgcggtgaccggcacgctgcgcagcgatgctgtgccggcacaggcgcgcggtgcgccatgcttcctggcatggacgcccgggctgacgccggcgcaactggacgatctcgcgcccgccggcttcgacggcgcattctgctcgctgccgtggtgggattttcgcagcccctggctgaccgaggaaatcgcgcggctgcgccccttcggccgggtgctggccgccccagcgctgacgccggcaagccatgacgcactcagcgcgcggcgtgcgctgtggaccgccgcggcgatcggcgacggcatcctggtgccggccggcttcgagaccggcggcgcgctggcacgcgacccgctggccacggatggtgccccgcatcagggcgcgccgtacgacatcacccacgagctgctggaaaccaatacctggctggctgcgcgcgatccggcgccggcactggccgtgcgcctgctgagcggacccgacgcgccgctgacggtgctggcacggctgcctgtgccggacggcgcctgccccgctcccgacgccgccggcacccgtagcgaccctgaggtaccggacggtgcccccgccctggcagtggtgctcaatccagaccccgcggcgcccggcacgctgggcgccgaccgcgtgctgagcgcgctgccgcacgccagcgcgcacctggaatcgtcactgggcggcccgggcgggacggtcgatgccaaccaccggctcgatgcgctggccagcatcacgctggcaccggccgatatccgcctctacgaagtgcccccggtgcccctgacgcggcccggcatgccggcagccgacgcgcgcgcgccgcacggccatgaaacgctggccgccaccggcctgggcagcgtggtggcggcaatggaggccccgcggatcgccatcgagcacgtcgagcccgcctgcaacgaaggccgcttcgcggtgcggcgcgtggtgggcgagcgcgtgaccgtcagtgccgatatctggatggatggccacgacaagcttgccgccatggtgttgtggcgtgcgccgggcgagactggctggcaccaggcgccgatgcagcccgtgatcaacgaccgctgggaaggcagtttcccgctggtggcgctgggccggcatgaattcacggtcgaggcctggcgcgacaccttcgccagctggctcgacgagatcggcaagaagcgcgcggccggcctcaacgtggcgctggagatcgaggaaggcgcgcggctggtggccgatgcgctgctgcagcctgccaggaacgggaagcagggcaatggcgggaagaacacccggacggcaaccgcggacaccgagctctcagccatcgtcgacgaactgatcaccgctgccggcgatgacgctcgccggcaggagatcctgctgtcgccacgcaccgaggccgcgatgcaggcagtgatggcaaccccggcgggtcgcccgtttgcctcgcgtcatccggtggccatgccggtcgaggccgatcgcctggccgcgcgctacgccagctggtacgagctgttcccgcgctcgcaaagcaacgacgagacccgccacggcaccttcgacgatgtcatcgccaggctgcccgcgattcgcgcgatgggcttcgacgtgctctacttcacgccgatccacccgatcggccgcacccaccgcaagggccgcaacaacagcctgcgcgccgagccgggcgatcacggcagcccctacgccatcggcggcaaggaaggcggccacgatgcgctgcatcccgagctcggcacctttgaagacttccgccgcctgcgcgacgcggcggccagacatggcctggagctggcactggacttcgccatccagtgctcgcccgaccatccgtggctgcgcgaccacccggaatggttcgcacaccgcccggacggttcgctgcgctatgccgagaacccgcccaagaagtacgaggacatcgtcaacgtcgatttctacgccgcagcgcccgcgggcgccgcgctatggcaggccctgcgcgacgtggtgatgttctgggccgaccagggcgtgcgcatcttccgcgtcgacaacccgcacaccaagccgctgccgttctgggagtggatgatcgccgacgtgcgcgcgcgccaccccgacaccatcttcctggccgaggccttcacccggcccaagatgatggcgcggctggccaagctgggcttcagccagtcatacacgtacttcacctggcgcaatgccaagtgggagctgaccgaatacctgaccgagctgacgcaaagcccgctgcgcgacttcttccggcctcacttcttcgtcaacacccctgacatcaacccctacttcctgcaccagggcgggcgccccgcgttcctgatccgcgcggcgctggccacgctgctgtcggggctgtggggcatgtacagcggcttcgagttgtgcgagagcgcgccctttgtgctgaacggcaaggtgcgcgaggaatatctcgattccgagaaataccagctgcgcgtgcgcgactggcagcagcccggcaatatcgtcgcggagatctcacggctcaacgagatccgcgccgggcacccggcgctgcagaaccacctggggctgcgcttctaccatgccggcagcgacgccgtgctgtggttcgcgcgcttcatgccgggcaccgactacctgttcggcgacgacgtgctgctggccgcgatcaacctggatccgcgcacggcgcacgagaccgacatcgaaatcccgttgtgggaatgggggctgcccgaccaggccggcctggcggtgcacgacctgatgcacggccggcgcttcgagctgcgcggcaagcaccagcgcatccggctcgatccggcgcaactgccgttcacggtctggcatgtgcgcccgctggagcgccccgctccccgcccaccctcggcgccggcctcgaccgacccgcacggcgcctgacaggcatacgtggagacacggatgaaacgccttaccgaaaccggcagtgccgccctgctcaacgccgatccgctctggtacaaggacgcgatcatctaccagctccacatcaagtccttctacgacgccaacggcgacggcgtgggcgattttgccgggttgctggccaagctcgactacctggtcaacctgggtgtggacacggtctggctgctgccgttctatccgtcgccgcgccgcgacgatggctacgacatcgccgactaccgcaacgtccaccccgactacggcacgctggccgaggcgcgccgctttatcgccgcggcgcacgcgcgcggactgcgcgtgatcaccgagctggtgatcaaccacacctccgaccagcatccgtggttccagcgcgcgcgcgccgccaagcccggctcggcggcacggcgctactacgtgtggtcggaccatgaccaggcctacgccggcacccgcatcatcttctgcgacaccgagaagtccaactggagctgggacccggtggcgggcgcctacttctggcaccgcttctactcgcaccagccggacctgaacttcgacaacccgcaggtgctcaacgaggtgctgtcggtgatgcgctactggctcgacatgggcgtcgacgggctgcgcctggacgcggtgccctacctggtcgagcgcgaaggcaccagcaacgagaacctgcccgagacccatgccgtcatccgccatatccgtgcccacctggacgcgcgcttccccggccgcatgctgctggcagaagccaatatgtggccggaggacgcgcagcagtactttggcctgaccgggccggagccggaaggcgacgaatgccacatggccttccacttcccgctgatgccgcgcatgtacatggcgatcgcgcgcgaagaccgcttcccgatcaccgacatcatgcgccagacgccggaggtgccgcccaactgccagtgggccatcttcctgcgcaaccatgacgaactgacgctggagatggtgaccagcagcgagcgcgactacctgtgggaggtctacgccaccgaccggcgcgcccgcatcaacctgggcatccgccgccggctggcacccctgatggagcgcgaccgccgccgcatcgagctgatgaacagcctgctgttctcgatgccgggcacgccggtgatctactacggcgacgagatcggcatgggcgacaacatccacctgggcgaccgcgacggcgtgcgcacgccgatgcagtggtcacccgaccgcaacggcggcttctcgcacgccgaccccgagcgcctggtgctgccgccgctgcaaggcccgctgtatggctacgaagccgtcaacgtcgaggcgcaggcgcgcgacccgcattcgctgctgaactggatgcggcgcatgctggcgctgcggcgcaagcaccgcgccttcggccgcggcacgctgcgcttcctgtttccgggcaaccgcaagatcctggcctacctgcgcgaatacgaggacgagcacatcatgtgcgtggccaacctgtcgcgcgcgccgcaggccgtcgaactggacctgtccgccttcaacggccgcgtgccggtggagatgatgggcgccacgccgttcccggccatcggcacgctgacctacctgctcacgctgccgccttacggcttctactggttcgtactcagtgacgaggcgcagcccccgtcatggcacgtggaagcacccgagcagatgccggaccagatcaccctggtgatgcagaacacgagccggccggagctgaccgacgcctcgcgccgcatcatggccagcgacgtgctgccgcactacatcagccggcgccgctggttcggcgccaagcacgagcgcatcgagcgcatcgacctggcgtacctgctgccatttgcgcgcggcagcagcggcgaagatgtctacctgggcgaggtggaggtgaccctgcctggccgcaccgaacgctaccagctgccgctgggcatcctgtgggaccgcgagagcgccgacagcgtgtcgcagctggcacatggactgtcgatggcgcgcgtgcgccagggcagccgcgtggggctggccaccgacggtttcgtggtcgagccctttgcgcgcgaggtggtgcgcgcgctgcgcaatgacgtgcaggtgcacgccggcaacgacatcatccacttccgcgccgaagccggcctggccgcgctggaactggagcgcgacccgatcgaatacatgtcggcagagcagtccaacagctcgctgtcctataacaacaccgccgtgctcaagatggtgcgccgggtctctggcggcatccaccccgaggccgagatgacgcgctacctgaccgtgcagggctatgcgcacgcggcgccgctgctgggcgaggtggtgcgcaccgggccggatggcgtgccgcatacgctgatgctgctgcagggctatgtcctgaaccagggcaatggctgggactggaccctggactacctgggccgcgccatcgatgacgcgctgccctcgcaggagagcgaggacgagtttgccgaggccatgaacggctatgccgcgctggctggcacgctcggccgccggctcgccgaactccatgcggtgctggcacggcccagcggcgacgacgcgttcgcgccgttgccggccaccgaaggcgatgcgcgcgcgtgggccgagcaagccttgcgtgcgctgcagcgcgccctgacgcggctggagtccgcgcccgccaccgtgccgggaccggtgcgccagggcttcgaggccgacgtgcagaccctgctggccgcgcgcgacgcgctgcccgcgctggtcgaacagctcgccgctgccgcgccgggcagcctgcagacacgcatccacggcgacttccacctgggccaggtgctgattgcgcagaacgacacctacctggtcgacttcgaaggcgagcccggcctgccgctggactggcgccggcgcaagacctcgccgctgcgcgatgtggccgggctgctgcgctcgcttgactacgccgcggccacggtcggcaccgaccgccaggagcgcacccacagcgaactgccgccgcagctggccgaacgccgcgcggtgctgctggagcgcttccgcagcaccgccagcgaagccctcctgaactgctaccacctgcacatgcaggactcgggcacaccctgggccgcgcccggccagctgcagccattgctggacctgttcctgctggaacgggcagcctatgaggtcgactacgaagccgccaaccgcgtggcttggatcgacctgccggtcagcggcctggcgcgcctggtgcgcaagctgctggcgccgggagaccagccatgacccccgcccatggcacgcagcccggcatgctgccgggccacgagttcgaggccttgcttggtgcgcgccaccatgatccgtttgccgtgctgggcccgcaccctgacggcgacggcacgctggtgcgcgcctgcctgccaggggcggcgtcggtgcagctgaccgatgcgggcggcacgccactggcggagatggcacggctgcatggcggcggcgtcttcgccgcgcggctgccgcgcgaatacaagggcggtgcgcccgattaccggctgcgcgtgcaatggtccgacggcagcgggcagtgcggcgccgacccttacgcctttggcctgctgctgggtgagctggacctgcacctgatcgccgagggccgccacttcgagctcggcgcctgcctgggcgcgcagtggcagcgcgtggacggcatcgacggcgtgcgctttgccgtatgggcgccgaacgcgcggcgggtctctgtgatcgctgacttcaacggctggcatccggcgcggcacccgatgcggctgcgccaccccagcggcatctgggagctgttcatccccgccgcactgggcgcgcagcccggcagccgctacaagtacgacctgctcgacccgcacggcaccgagctgccggacaaggccgacccgctcgcgctggccaccgaggcgccccccgccaccgcctcggtggtggccggaccgggccagggcgcgccccccttcgcctggcatgacgccgactggatggcgcgccgcggcggcgccgatccctacgcagcgccgatgtcggtctacgaggtccacgctctgtcgtggctgcgcgcggccaacgacacgcagcgcggctgggagatcctggccgagcggctggtgccatacgtgcaggaactgggctttacgcatatcgaactgctgccgatcaccgagcatccgttcggcggctcgtggggctaccagccgctgtcgctgtatgcgcccaccgcgcggctggggccgccgcaggccttcgccgcctttatcgaccgctgccaccaggccggcatcggcgtgctcctggactgggtgcccgcgcacttcccgaccgatccgcacgggctggcgcgcttcgacggcaccgccctgtatgagcacgaggacccgcgcgaaggcttccaccaggactggaacaccctgatctacaacctcggccgcaacgaggtgcgcggcttcctgctggccggcgcgctgcactggctggagcacttccacgccgacggcctgcgcgtggacgcggtggcatccatgctctaccgcgactacagccgcgagcccggccagtgggtgccgaaccgcttcggcggccgggaaaacctggaagccatcgacttcctgcgcgaactgaacgccgtggtccacgaacgctgccccggtgcgctgaccatcgccgaagaatccaccgcctggcccggcgtgaccgccagcgtcgccagcggcgggcttggcttcgacttcaagtggaacatgggctggatgcacgacacgctgcattatctcggtcacgagcccgtccatcgcgcctggcaccaccaggacatgaccttcgggctggtctatgcgtggtccgaggccttcgtgctgccgctgtcgcatgacgaggtggtgcacggcaaggcctcgatgatcggcaaggtgcccggcgacgagtggcagcgctttgccggcctgcgcgcctactacggcttcatgtgggcgcacccgggcaagaagctgctgttcatgggcggcgaactggcgcagtggcaggaatggaaccacgatgccgagcttgactgggccttgctggaccaccccatgcaccgcggcatgcacacgctggtgcgggatctgaaccgcctctaccgggagctgcccgcgctgcatgcgctggaccaccgcccggaaggcttccagtgggtggtgggcgacgacaaccataacagcgtgtttgcgtggctgcgccgcgcgggcccatacagccgcgaagtggtgctggtggtggtcaacatgaccccggtgccgcgctatggctaccggctcggggtgccgtatgccggcgcctggcaggaatgcctgaataccgatgccgccgtgtatggcggcaccaatgtcggcaacagcggcgcggtagcggcagtggacgtgccttcgcacgggcagccggcttcgctcgcgctgacgctgccgccgctggccacgctggtgctgcgcttcgatcctggtggcggcatccagggcgcatcgacatgagccgacagttcgcggaccggctgctgccgggcaagccgtatcccctcggggcccactgggacggcctgggtgtcaatttcgcggtgttctcggcccatgcctcgcgcatcgacctgtgcctgttctccgacaacgggcgcaaggagctggcgcgcctgcagctgccggaacgcaccgacgagatctggcacggctacctgcccgatgcggcgctcggcacgctgtacggctaccgcgcgcacggcccctacgatcccgcgcacggccaccgcttcaacccgcacaagctgctgctcgacccgtatgcgcgccagttgagcggcccggtgcgctggtccgatgcgctgttcggctaccgcctgcaaagcgcgcgcggcgacctgacaccggaccgccgcgacagcgcccccaccatgcccaaggcggtggtggtcgacgagagcttccactggggcgacgaccgcccgcccgcggtgccgtggccgtccaccgtcatctatgaagcccacctgcggggcctgtcgatgctgcgcggcgatctgctgcccaacctgcgcggctccttcgccgcgctgtgcgacccgcgctttatcgaccacctggtgcagctcggcatcaccaccgtcgagctgctgccggtccacgccatcctgcaggaccgcttcctgctggagcgcggactgcgcaactactggggctacaacaccatggcgtacttcgcgccggagcccgcttacctgggcaccgggcaactgcaggagttcaaggtggcgatgcggcgcctgcacgcggccggcatcgaagtgatcctggacgtggtctacaaccatacctgcgagggcaacgagctggggccaacggtgtcgtggcgcgggctggacaacgccagctactaccggctggtgcccggcgacgagcgccactacatcaacgacaccggctgcggcaatacgctcaacctgtcgcatccgcgcgtgctgcagatggtgatggactcgttgcgctactgggtgcactgctaccacgtcgatggcttccgcttcgacctgggcaccaccctcgggcgcgagggcaacggcttcgatgcgggctcgggctttttcgatgcactgatgcaggatccggtgctgagccgcgtcaagctgatctccgagccgtgggacctgggcccgggcggctaccagcttggcaaccacccgcccggctttgccgagtggaacgacaagttccgcgacgtggcgcgccgcttctggcgcggcgacgccggccaccgcggcgaactggcggcgcggctggcggcctcggccgacctcttcgaccgccgccaccggcgcccgtgggccagcatcaacttcatcaccgcacacgacggcttcacgctggccgacctggtcagctacagcagcaagcacaacgaggccaacggcgaagacaaccgcgacggcaccgacgacaacgccagcgccaactggagccccgacggcagcatcgaaggccccaccgacgaccccgctatcctggcctgccgcgcgcgcgtggcacaggcactgatggccacgctgctgctgtcgcagggcacgccgatgctgaccgccggcgatgaatggggccgcagccagcaaggcaacaacaacgcctactgccaggacgacgagatctcgtggctggactggaagcaggcccagacgcccggcgcccagccgctgcagcacatggtgcgccgcctgctggacctgcgccggcggctgcactccctggccggcgaccgcttcgcgcacgggcgcgaggaaccggcgcagggcattgccgatattgcctggttcgataccgacggcaaaccgcccacccccgaggaatgggccgacccggagatccgcacgctcgcgctgcgccgcgcggccgcgccgccccaaccggagcgcgcgcagctgggctcgctggcgcaggacgaagagaacgatgccggcgccgtgcaggtaaccttgctgctgctcaacgccggcgatgccgaggcctccttcctgctgcccgggcccacgctggcctggaaactgctgttcgacagcagccggcccgacgccaccgaggccgaactcgcgagcgaggcggtcgccgacagccaggcggtggcgggccactcgctggtgctgctggcggcccaggcccgcagccgccagagcgcgccccaggaaagcccgccgctgggcgcgccgcaggaggcacaggcatgagccggcgcgccacccgccacgacacgcccacggcgctgcatgcgctggcactgcgcgcgggcctgctgccccggtggacggatgcctggaaccagccccagaccgtgtcggacgccgcactgcggcgcgtcctggacggcctgggcctgccttgcgccaccactggccagtgcgaagcgtcgcgcgcatggcttgcctccgatgacgccgcgcatgcactgccgccgctggtcaccgccgagcgcggcaagccggtggcggtgccgtggccacataccctgccgcagcggtcctaccggctgacgctggaagacggcgccatcgtcaccggcaccgcggagcgtggcaacgatggcagcgcgcgcgacagcgacggcaccatgctgctgcccgccatcgacgtatgcggctaccaccgcctggaactcggcgatgcgcacaccgtgctggcaatcgctccgccgcgctgctacggcgttgccgatgcgctgcggcacgccggccgcgcgggcgaactgacccggccctggggcctggcagtgcagctctacggcctgcgccgcggcgcgccctgcggcctgggcgacctgagcgcgctgacccagtgctgcatcagcgcagccggcgccagcgccgacgccgtcgccatcaacccgctgcacgccggctttgccgccctgcccgagcgctatagcccgtatgcgccgtccagccgcctgttcctgaatccgctctatgccgaccccgccgtgcaattcgggcaggccgcggtagactgggccgtcgccgcgctcggcgcgggcgagtcgctgcaagcgctggaagcccgcagcgagatcgactgggtcaagctgacgccgctgcgctacgccatcctgcggtggctatgggagcgcagcgatgcgctgctgccgcgcgcggcgctcgatgactgcgccgcctttcgcgcgcgcggcggcaccgcgctgcacgcgcacgcatgctacgaggcgatccaggcccggcgcctggccgacagcgccaacggcatgaaccacaaccccgcgcctgactggcgctgctggccggtcacgctgcgcgcgcccggcgatgccgccgtggcggcctttgcacaggcccatgccaatgaggtcgcctaccacgctttcctgcaatggattacggccgacggcatggcacgcgcgcagcgtgcggcgcgcggcgcgggcatggcggtcggcatcgtctccgacctggcggtgggggccgaccctggcggcagtcaggcctggacgcggcaacaggaaatcctggcgggcttccatgccggcgcaccgccggacctgtacaacccgctcgggcaggactggggcgtggcggtgttctcgccgcgcgggctgcgccgccgcggctacgcggccttcctggagatgctgcgcgccaacctggcccatgccggcgggctgcgcatcgaccatgtgctgggcctggcacgcatgtggctggtgcctgccggtgccccggccagtgaaggcgcctacctgcgctatccgctgcaggacatgttgcggctggtggcgctggaatcatggcggcaccgcgccatcatcatcggcgaaaacctgggcacggtgccgccggagctgaatgcggcgctgtcggcccgtggcgtgctgggcatcgatgtgctgtggttccagcgcgaagagagcgcgccagtggatgcggccgaggcagctcagcgggtgcccgccccggcgcccgacaccgtgccggccttcctgcctcccgcagcctggccgcccgatgccatcgccaccacctcgacccacgacctccccacagtcaccggctggtgggccggccgcgaccttgcgtggcgcgaccggctgcacctgctggcgccgggcgaaaccctcgcggcgatgcaggccggccgtgcgcgcgagcgcggcgcgctctggcaggcgctgtgcgcagcggggctgtgcagcggcgccgtgccggaccccgccgatgccccgctcgatgccgtgctggcgtggctgggcaccgcgcgcaccgccatgcgcctggtgccactggaagacctgctgggcgaggccgagcaacccaacctgcccggcaccaccagcgtccaccccaactggcagcgccggctcgacgccgatgtacgtgcgctgttcgataccccgatggtgcgggcgcgcgccaacgccctgcgcggcggccgccacggcgcacgccatccgccgccacgcgcgtagccacggctcgcccgcaaaaagtgccgcttgcaagaccagctccgcgatctccctgcagggattgctccatccactaagcttgacccacgtacatgcgcaggagcctcgccatgaaggaatctgtccggcccgagcatgccgatgacacccgtaccgccctgtccggcgccagcctgcgccgggccttcctcgaccacgtcttccatacccagggcaagctgcccggccacgccagccagaacgatctctaccaggcagcggcgcataccgtgcgcgaccgcctggtgcagcgctggatcagcaccgccgaggcctacctgggccagccctcgcgcaccgtcgcctacctgtcggcggaattcctgatgggcccgcacctgggcaacaacctgatcaacctgggcatcttcgacgaggtgcgcgaggccatggccgctgccgggctggatctagaccgcatcctggagcaagaggtcgagccggggctgggaaatggcggcctgggccggctcgcggcctgcttcatggattcgctggcgacgctggaaatccccgcgctcggctatggcatccgctacgagtacggcatcttccagcagaccatcatcgacggcatgcaggtggaatccaccgatacctggctgcgcaacggcaacccctgggagatccagcgctcagagtgggccgtgcaggtgcgcctgggcgggcacaccgagcactacaccgacgaccgcggccactaccgcgtacgctgggtgccggccaagaccgtggtgggtgtgccgtttgactcgccgatcctgggctaccgcgtcaataccgtgaacaccctgcggctgtggcgcgcggacgccaccgaggcgttcgacttccataccttcaaccgcggcgactacctgggcgcggtcagcaagaaggtcacttccgagaacctgaccaaggtcctctaccccaacgacgagaccagccagggcaaggagctgcggctggagcagcaatacttcttcgtcgcctgttcgctgcaagacatgctgcggctgctcgccgtcgacggcatcccggtgacgcgcttccacgagaagttcgcggtgcagctgaacgacacccacccggccgtgggcattgccgagctgatgcggctgctggtcgacgaccatgacctgccctggaacgaggcctggcacatcacgcagaatgcctttgcctacaccaaccacacgctgctgcccgaggcgctggagcagtggccgctgccgctgtttgcccgggtgctgccgcgccatctcgagatcatcctggaaatcaacgcgcgcttgctggacgaggtgcggatccgcttctacggcgacgaatcgcgcctggcacggctgtcgctgatcagtgagtacggcgaaaagcaggtgcgcatggccaacctggcgtgtgtgggcagccacgccatcaacggtgtggccgagctgcactcacggctgatgcgcgaggacgtgctcaaggatttctacgagatgtggccggagaagttcaccagcatcaccaatggcgtgacgccgcggcgctggctggcgctgtccaacccgcgcctgacgcggctggtgtcggaggcgatcggcgacggctggatctccgacctggcgcagctccgcgcgctcgagccgtatgccgaggacgcgggctttcgcgaacaatggcaggccgcgcggcaccagaacaaggtggcgctggccgagctggtccgcgaaaccaccggcgtagtggtggacccgtcctccatgttcgatgtgatggtcaagcgcatccacgaatacaagcgccagcacctggcggtgctgcatgtgatcgcgctgtaccaccgcatcaagtccgaccccggcaccgagatccagccgcgcaccttcctgttcggcggcaaggcggcgccgggctacgcctatgccaagctgatgatccgcttcatcacctcggtggccgacgtggtcaaccgcgacccgcaggtgcgcgaccggctcaaggttgtgttcctgcccaacttcaatgtcacctacgggcagcgcatctacccggcggccgacctggccgagcagatctcgctggcgggcaaggaagcgtccggcaccggcaacatgaagttcgcgatgaatggcgcgctcaatatcggcaccatggacggcgccaatatcgagctgcgcgaagccgtgggcaacgacaacttcttcccgttcggactgaccgcgccggaggtctatgggctgcgtgcaagcggctacgaccctgccgcctactaccacagcaacccgcagctgcgcgcagtgatcgacctggtccagcagggcttcttctcgcgcggggacccggggctgttccgtcctctgtttgacccgcagcagaggcacgacccctacctgctgatggccgacttcgcctcctacatcgagtgccaggagaaagtctcccaggcctttgccgaaccggcgcgctggcaacgcatgtcggtgctgtcgtgcgcgcgctccgggcgcttttcatcggaccgggcgatccgcgagtattgcgagcgcatctggcacatcgagccggtgccggtgcggctgctgcaccgcgccagcggtgcgccctggcaggttgaatctccggcgcacgccccgcgcgccgcctaaggcggcactgcgggcgtgggctagcgcacgtccgcatcgcgcaggtagtttctacaatggcccatgtaacaaagcccgcgctggcgcttgcccccgccagcccgcggcctcgccaagcgttgtcctgcgggcatggagttcgcattgtgccaagaccggccatccggccggctctcccttggcattccccacggccgtcccaaagccaggagccgaatttgcacgccaacccgtttctgctcgcccccggcgcccgctccgccatgcccagcctggccccgcacgactgctttgcagcgcccactgccgccgggccgctgggcctgcccggcaacgacgacaatgcgcacgactacctgttcgggccggcttggttgccggacggccgcgtgcggttccgcctgtgggccccggacgcagccgagcaaggccaggcggtacggctggagatcgccgggctcggtccggtgcgcatggcggccggcgccaacggctggttcgaggccatcgttccgtgctgcaatggggcacgctactggttccggcttgacgacggcaccaccgtgcccgacccggcctcgcgctgccaggccgacgatgtgcacgggcccagcatcgtgcccgcgcccgacgccgccggcgcctttgcgtgggcgtgttcggactggcgcgggcgcccctggcatgaagccatcgtctatgagttgcacgtgggcctgtgcggcggctttgccggcgcggcgcagcagctgccgcggctggcggcgctgggcttcaccgcggtcgagctgatgccggtggcggagttccccggcacgcgcaactggggctatgacggcgtgctgccgttcgcgccggagtccgcctacggcaccccggacgaactgcgcgcgctggtggaccgcgcccaccagctcggcatgatggtgctgctggacgtggtctacaaccacttcgggccggagggcaactacctgcaccgctacgccagcgcgttcttccgcgcggaccggcagaccccgtgggggccagccatcgatttccgccggccgcaggtgcggcgctttttcaccgagaacgcgcgctactggctggagcagttccgcttcgacggcctgcgcctggacgccgtgcacgcgatcgaggacgaaggctggctggcggcgctgcccggcgagctgcgcaccatgctggccgaaggcgacggcgccagccgccatctccacctggtgctggaaaacgacaacaacgatgccgaactgctggccaagggctacgacgcacagtggaacgatgacgcccaccatgccctgcacgtgctgctgaccggcgagggcgacggctattactgcgactacacccgctgcgccgatgagggcgaggatgcgcccgcggggcgcggcgagcccgcgctgcggcatcttgcgcgcgtgctgggcgaaggctttgcctaccagggcgagctgtcggcgcaccgctctgccgccgcgccggacgtgtcgtcaagcgcggacagcgtgcgccgcggacagcccagcgcgcacctgccgcccacggccttcgtctgcttcctgcagaaccacgaccagaccggcaaccgcgcactgggcgaccggctggccggcctggcggaccgcaatgcgctgcgcgcggcggtggcgctgcagttgctgtgcccgcaggtgccgctggtgttcatgggcgaggaaaccggcacgcagcggcccttcctctacttcaccagccacccgcccgaactggcgcaggccgtgcgcgacggccggcgccgcgagtttgcggcttccacggcattccgcgacgatgcgcgcgccgcggccatccccgatcccaacgacccggccaccttcgaggcgtcgcgccccgagctggaagacgacggcgactggaccccgtactaccacgagctgctcgcggtgcgccgccgtgaactgctggaccggctggccggctgccagtcggccggcgtcgatatcctggggccggccgcgctgtgcgcacgctggcggctgatggacggcatggagctgagcctgtggctgaacctgggcagcgaagccgtgccatgcatgcggccatgccacgacatgagcgcggcgctgcatgaaagcctgcccggcgccgcggccgagctgtccgcgggcatgctgccgccgctggcctgcgtcgccaccatgtgcgagcccgcagcggcgcgcgccagataatgcccgccggcttgccggaatccctgccaggcagccatggcgatggcgatggcggcgaccatgacctgccccgcgccaccgcgcggctgcagctgcacccgggctttacctttgccgatgctgctgccgtggtcgactactacgccgcgctcggcgtcagccacctgtacctgtcgcctgtgtgcagcgcgcgccccgcctccacccatggctacgatgtcaccgacttcacccgcgtgcgcgacgagctgggcggcgagcccggcctgaaagcgctggccgggcgcgcccgcgccgccggcctcggcctggtgctggacatcgtgcccaaccacatggcggccgaccccacccacaaccactggtggcgcgacgtgctgacccacggacgcgccagccgctgcgccgccagcttcgacatcgactggaccccgcgcgaccccgccctgcatggcaaggtgctgctgccgatactgggccagtcctactgggacacgctggtggcgggcgagctgcaatgggtgcctgcaagcgcagacgatgccgcccacctgcgctacttcgagcactcgctgccgctggcgccgggcagcgtggatgccgccgccgcaacccagcccggctggtacgaccccacgcaggccgaaggccgcacccggctgcacgcactgctggagcgccagcactaccggctgacctggtggcgcaccgccgccgcggcactgaactggcggcgctttttcgagatcagcgatctcgtcggcgtgcgcgaggaagacccgcaggtattcgacgccgtccacgcgctggtcttccgcctgctgcgcgaaggctggatcgacggcgtgcgtgtcgatcatgtcgacggcctggccgatcctgccggctactgccgccggctgcgcgccgaactggaccggcacgcagccgcgcgcccgccgttgctgcggctggcgcacccgtggctggtggtcgagaagatcctgggcccgcgcgaacggctggcgccggactggcaggtggatggcaccacgggctacgacttcatggacgaggttgccgccgtgctgcacgacggcaacggcgaggcgccgctgggcgcgctgtggacttcggccagcggcgatgcgcgcccgtatgccgcccatgtcgcggcggcacggcgccaggtgctggagcggcacctggtaaccgagtacgaaggcgccgccgcctgcctgcacgactgcgcgaagcaggagcccggcacgcgtgacctgacacgcgcggcgctgcggcgcgcgctggccgcgctgatggcggcggtgcccgtctaccgcagctactttgacgcgcaacccggcgcacgcgacgccactgccgcacaggccgaccatgccatgctggaccaggccatgcaggcggcgcgtgccgacctcgccccggacgaggccgtggcactggcctttatcggcggctgcctgcgcacgccagccccgcccgacagcgaaaccggcgtactgcgccgccgcctgcagcaactgatgcccgccctggcagccaaggccggcgaagacaccgcgttctaccgctacgggcggctgctgtcgcgcaacgaggtaggcagcgaccccggcacgctggcgctgccgccggcgcagttccacgcgcgcatggcggcgcggcgcatggcctgtcctcatgccatgctggccactgcgacccacgaccacaagcgcggcgaggacacacgcatgcgcctggccgtgctgagcgagatgcccgctgcctgggccgaggccgtggcggcatgggaacgcgcctgcgcaccgctgctgtcgacgctgccgcaggccccggaccccggcgaccgcctgatgctgtaccagaccctggtcggcgcgtggccgatggaggacatcggcaagcctgcaggcagcaacaccgtcgaggccttcctggagcgcgtgtccgcgtggcagctcaaggccatccgcgaagccaagcgccacggcaactggacctgccccgacgcagcctacgaagccgcgtgcgagggcttcctgcgcgccatcgcggcggactggccatcgggtgtgctggcgcatatcggccagtttgcgcagcacattgccgtggcaggcgccgtcaacagcctggcacaggtgctggtccagctgaccgcaccaggcatccccgaccgctaccagggatgcgaaggctgggacctgagcctggtagaccccgacaaccggcgcccgcccgattttgcgcaactgcgcgcgcgcctgggctgcagcgctggctgggcccactggctggcgcactggcgcgacgggcgcatcaagcagcagctgatacgccaggtgctggcagtacgccacgcccatccccggctctttgccgacgggcaatacagcatgctggcggcgcaaggcgcgctggtgccgcaggtgctggcctttgcccgcaccgcggatgcgcaccaggccatcaccgtggtgacgcggctggtggccacgcaggtcgacccgaccatgccgcgcatcccgcccgcgggctggggcgacaccgccctgaacgtgggcgcgccgcagccgagccgctggaccgatgcgctgaccggccacgtgctggacgcacccatgggccggctgcgcctgcgcgaggtgctgggcggcttgccggtggcgctgctgctgcgccagccgtaagcggcccaggggcagcgcgaacgctcgcggcctcaggacttctgcaccgccgtgtgcaacacgatcggcgtcagcgggccatggtgatggcgtggcgtgccatgcggcgccgcctggccgtgctgcggcggctgcgcgccgtcgtgcggcccgcgcctcgcctggccgggcgaagcgccgcgttcctgcggcaggtagggccggatcacgacggcaacgtaatcgtcctccttgggcgtgacaacgatatacgccaggcccgacatcaccaggccgacctcaccgagctcggtcgcgatgcgagccacgataaagcgctgcagcagcagcgggttgacgctgtcgtcaatcgcaagcgcggccgtgcagatggtcaggaagcagcgctcgacctcgcggcacaccaccaccacctcatcgatggcgtagcccgagcggctggcgcgcaccagcaccgacacccccgagctgggcgcggcgcggtgccagcccggcttgaccttgaagctgggcagggccaggccggagccggtgtcgtgggccacggcattgaagcgctgggcgaagtccgtgggcgtcatcgcaagcagctggcgctccaccggcgccgaagacaccgagacggacgaggccaggacgacggtggacaggatgctggctaggttcatgactacctcgcaacggatgagccgctcccccccggctgcgctgtcgggcccggcggcacgcggcgcacagggggccgccgcggcatggggccggcgttgcgggctgtgctcgccggcacttgccgctcgccagtttttgccagcatttcctccactatagacacgacggcacgcaatcacacgacggcgcaagcatcgcgccggtcatgccgcgcgggcgctggcaggctgcacatgcagtttctgccgcggctgtaaaaactacgccgtgtgcgccgaaccggcagcgtcgcaagccgcacaggacccagctccgcaccggctgcgccgacgccggcgccgggaacggagcttgcaggtcaaaggcagatgcggagcaggaatcgccctgcccgctgccaagtacaggaggatcgtcatgacaccacgcttccgcatcgcccgcctggcgctgcctctggcggtgctggcgatggccgcctcccaggccgttgcggccgccccgaccgatgcgccggcggcgccgtcatcaacgggccgcacggccgcgccgcgcgacaccgcagccgccagcgaccgcgccatcactgccgaagtccaggcccgcctggccaacgcgcgcacgctggaccccgccaggatccgcgtatccaccactgacggcgtggtcaagctggaaggcaccgtgcgcgacgataaacagcgtacgatggcaatggaactggctcgttcggtgcgcggtgtgagcgccgtatccgacgagctgcgcgccggcaccgactgaccggcagcgccatgccaacctccgtggagacgccatgagcacccatcgccagcccgaccatgacaccacgcgacgccgcagcgagcgtcccgacccgcacaagggcggccccgacaccgaacatgaacggggcaagcccgggcgcgaccgccgccacgatgtcgagcgcgagcatgacatcccggatgagaacaccgagccgccttcagtcaggcgccgcggcgacaggcccgatgacagcgaagcgccagtggagaaccactgaatccgccgagccaaccgaacaggaggcacgatgagcaagaccgtacgtacccaccgtatcggcccacgccacggtgaccgtgtgggcggcaccgcgcccgcgccgcgcgaaggcgcgcaggcttccgccggccgccgttcgcgcgagaacaccgcgtccggtgccgcgcgcgccgacgcgggccatatcccgagcacgctcgaccccgatctcgaacaggaaaccgacgatatcgacgaagaaatcgagcagcgcgagaacgaggcccacaccgcgcaggatgaggaaagcccggaggaagagatcgccgatgaagtgatgcatgccgccgaagacctgccggccgaagtgccggtcgacaaggccgaccacaccgatgagcgcgaggaacgcccaccccgcgcaccgcgttagctagcgcccggcaaggacgtatccgtgcggcaagacgaacgggggccccggtgcgcccggaatccccgtcttgatccggccgggacgctcatcaaagccaccgctatgtcgcactgaggtctccaccgtcatactgcggcgctgcgggcacctcaaagcgagccagcagcggcaggtggtcggaggcgacgcgcgccagcggcgaacggtggctggccaccgacaccaggtgcgcgcgcggcgacacccagatgcgatcgagggcaaacaccggccagcgcgacgggaaggtggcggtgtgcggcgcatgctcgaaatacgcatgcagccagcgcaatggccggccccacaggaaccattcattgacgtcaccgagcaggatggtcggcaacggcggtgcggcggccacgtagttgagcaactgctgcacctggcgccggcgctcaccggggcgcaggcccaggtgggtggcaatcacgcgcagcgcgctctcccagcccgaggccgtgcacgccagcgtgacatcgatggcaccgcgcggctcgcagcccttcaccgtcaggtcgatctggttcaccgcctgcggcgcaaagcgcgccagcagcgcattgccatagtcggcattgccgcgcacgcgcgtaaatccagagaccacgtgcatgccggtatggccggccaggtattccagggtatggtcgttgctgctgccggattccacttcctgcagcgcgacgatatcggcgtccagttcctccagcaccgttgcgatgcggtcaggccgatagcggcggtccgtgcccacggcgcggtggatgttgtagctgaccaccgtcatgctggcgatgccggccgcgtccgccgcgcagtgcagccctgcccgcgcgctggcgaccgcaggcgtgtcgccagggtcacgcgcctgggcaggatttacaagaggcggtaagtccggttgcattcgcatggccggcagcgctggccgctatgctcaggcgccatccaggaacgggttcggcttgccgatgcggcggccgaggtctgggctttcccaacgtgcgccctccgtgtatggatccggggcgcgctgcatggtcgtgccaggcacgccaggctgcgccggcacggtcgaaggctgggcctctggcgcgggtgccaggtcggttcgggtgggggcgttggcgccctgggtgtacgggtcgaacttgtcggtgctgcgcgcgccttgcgaatacgggtcataggtgccgcgcggcgtgcccggcgcctgcgccagggcggggattgcggcagcggccagggccacggccgcaaggattcggctgggacggatatgcttcatggttacctccggttgcgcgcgatgtgcacgccagtagccatggtcaagcgaaaggcgtgcccgtacgcccttcgctgcgccaatccctcaggcgatgctcaccttgcctgccacggcattgccccgtgccagcaccggcaccagcgctgcaccggtatggctggccgcgttgcgcgacaaggcctccggatcggccgcgccgacaatggcgcccccgcccgcaccgccttcggggccaaggtcgatgatccagtcggcctcggcaatcacgtcgaggtcatgctcgatcaccaccacgctgtgcccgccgtccgtgagccgatgcagcacgcggatcaggcgcgccacgtcggccatatgcaggcccacggtgggctcgtccagcacgtacagcgtatgcggcgccttctggccacgtcgcgtgatgtcgtcgcgcaccttgctcagttcagtcaccagcttgatgcgctgcgcctcgccgccggacagcgttggcgacggctggcccagcgtcaggtagcccaggcccacgtccttcatcagctgcagcggatgggcgatgttcgacatggccgagaagaactccaccgcctcgtcgatctccatcgtcagcacgtcgccgatattcttgccgcgccaggtgaccgccagggtctcggggttgaagcgctgaccgtggcagacatcgcacggcaccttcacatccggcaggaagctcatgccgatggtgcgcacgccctgcccttcgcatgccgggcaacgcccgtcgccggtgttgaacgagaaacgcgacgccgtgtagccgcgtgcgcgcgcttccagcgtatcggcaaagagccggcgaatggtgtcccacacgccgatataggtggccgggcatgagcgcggcgtcttgccgatcggggtctggtccacctccagcacgcggtcgatcgattcccagccggtgacggcgtcgcagccatgccagttgtgctcgacattgagcggcttcctggcgctcgacttggctgccttggcctcatccttcgcagcgttgcgcgcgcgccgggtcgccggcgacgacagcaccgagcggcccaccgcatcgagcaggttggtcatcagcacatcgcgcgccagcgtggacttgcccgaaccggacacgccggtaatggccaccagccgcgacagcggaatgcgcgccgtcaccttgcgcaggttatgcagcgacgcgccgtgcacggtcagccattccggcggatcggcgggcttgccggcggcgccgggcttcaccttgcgcctggcctgcagcggatggatgatcgggtgcgccaggaactgcccggtggtggagtccggcgccgccgacaggtcggccacgccgccctgtgccaccagcgtgccgccgcgcttgcccgcaccggggccgatatcgatgatgtggtcggcacggcggatggtgtcttcatcatgctcgaccaccaccagcgtattgcccttgtcgccgagcttgcgcagcgcgtccagcaggatctggttgtcgcgcggatgcaggccgatggtgggctcgtccagcacgtagcagacgccctgcaggttgctgcccagctgcgcggccaggcggatgcgctgggcctcgccgccagacaggctgggcgcggcacggtccaggctcaggtagcccagccccacttcctccaggaactgcaggcggctgccgatctcgctgatgacatcgcgggcgatctcggcatcgcgccccgtgaggcgcaggccatcgacccagcggcgggtatcggacacggtccactgcgctacgtcgacgattgcattctcgtcgaaggtcaccgcgcgcgcgaccaggttcaggcgcgtgccgtggcaatccgggcacggcgtgtcgaccacgccttcgggctcctgctcttccgacggcaggctctgctcgcggccgcggttgtcttccaccagcacggtatcgtcgaacgccgcgcgctgctcacgcgtcagtgccagcccggtgcccacgcaggtggtgcaccagccgtgcttgctgttgtacgagaacatgcgcgggtccagctcagggtagctggtgccgcacaccgggcaggcgcgcttggtcgagaacaccttgacctcgcccacgtgcgcggtgccgccgttgtgcatggcgtggtgcaggccgtccagcggcgccagcaggtgcatcacgcccttgccggcctcaagcgtctgcgccagcagcgcgcgcagctcggcctcgttctcaggcgagaccaccaggtcgcccaccggcagctcgatggtgtgctcgcggaagcggtccagccgcggccacgggtcgaccggcaggaattcgccatcgacacgcaggtgagtattgccgcgcgccttggcccacttggccaggtcggtatagacccccttgcggttgaccaccagcggcgccagcagccccacgtgctggccgcgatggtcgcgcagcagctgggcggcaatcgactccgggctctgcgaggtcaccggcgcgccgtcatgcacgcaatgctggatgcccagcttgacgtacagcaggcgcaggaagtgccagacctcggaggtggtcgccaccgtgctcttgcggccgccgcgcgacaggcgctgctcgatcgccaccgtcggcgggatgccgtagaccgcatccacctcgggccggcccgccggctgcacgatggaacgcgcataggcattgagcgactccaggtagcggcgctggccttcgtggaacaggatgtcgaaggccagcgtcgacttgcccgatccggacacaccggtgaccacgttgaacttgccgtgcggaatatcgacgttgagcgccttcaggttgtgctcatgcgcattgacgatgcgcaccacgtcctcgccctcgacctcgcggcgcgcgcgccgtgcctgcagcgcggcctgcagcggcacgccttcgatctcggcgcgctcggcggccagcgtgccggcttcgccgagcgccgcgtcatagtggatcagcgcctggccggtatgcgattcggcgcagcgcttcacgtcttccggggtgccggtgcagaccacgcgcccgccggcgtcgccgccctcggggccaaggtcgatcagccagtccgcggcgcggatcacgtccaggttgtgctcgatcacgatcagcgaatggccgccgtccagcagcttgccgaaggcgcgcatcagcttggcgatatcgtcgaagtgcaggcccgtggtcggctcgtcgaacatgaacagccggcgcgggatggcgctgggccgggtccgcgacggcgtggcctgcaccgcttcggcgaggaagccggccagcttcaggcgctgcgcctcgccgcccgacagcgtcggcaccggctggcccagcttcatgtattccaggccgacatcgacgatgggctgcagcacgcgcagcaccgcggggtcggcggcaaagcaggcggccgcttcgctgacggtcagctccagcacgtcggcaatgctcagcaagcgcggcggctggccgggggcggcacgctcgatcttcacttccagcacttcggggcgatagcgggtgccgtcgcaatccgggcagcgcaggtagacatcgctcaggaactgcatctcgacatgctcgaagcccgagccgccgcaggtcgggcaacgcccgtcgcccgagttgaagctgaaggtgcccgcggtgtagctgcgctgcagcgccatcggcgccttggcgaagatcttgcggatctcgtcgaacgcgcccacgtagctggccgggttggaacgcgcggtcttgccgatcggcgactggtcgacaaagaccacatcgtcgaccaggtccgcgccggtcagctggcggaacgcgcccggcgactcggtggccttgccgaagtgccgcgccatggccggatgcagcacgtcctgcagcagcgtggacttgcccgaacccgacacgccggtcacgcacaccagccgctgcagcgggatctcgaccgtgacgtcctgcagattgtgctcggtggcgccttccagcacgatgcgcggcagcttggcatccaccggtcggcgctgccagtgcgaggcatcggccacgcggcggcgcccgcccaggtactcgccggtcagcgtgccggcattgcggatgtccgccggcgtgccgtcgaagatgatattgccgccgcgctcgccggggcccgggcccatgtcgatcagtcggtcggcagccagcatcacggacggatcgtgctcaaccaccaccagcgtgttgcccgcatcgcgcagccggtgcatggcctcgacaatgcggttcaggtcgcgcgggtgcaggccaatgctgggctcgtccagcacgaacaaggtgttgaccagcgaggtacccagcgccgtggtcaggttgatacgctgcacctcgccgccggacagcgtgcggctctggcggtccagcgtcaggtagcccaaacccacgtcgcacaggtatttcaggcgcgtgcgcacctcggccagcagcagcttgagggcatcgtccagcatcgcgctgggcagggtcagctcgtcgaagaaacggcggatgcgctcgatcggcagcagcatcaggtcatgcacggtcaggccgggcaaagcctccagccgggtgcggtcccagtccaccccgcgcggcaggaagcggcgtggcggcgccagcacggcgtcggcattgtccttcgagcccaggcgccacagcagcgactcggtcttcaggcgtgcgccgccgcaggtttcgcacggcgtgtagctgcggtacttcgacagcagcacgcggatgtgcatcttgtacgccttcgactccaggtagttgaagaaccgcatcacgccgtaccagtgcttgttccactggccggtccagtccggcgagccatggatgacccagtggcgctcggcctcggtcatctccgcccagggggtgtcgcgcggaatgccggccttgcccgcgtagcgcatcaggtcgtcctggcactccttccaggccggggtctgcatcggcttgatcgcgcccccgcgcagcgtcttgcgcgcgtcggggatcaccaggccaagatcgacgccgatcacgcggccgaagccgcggcaggtctcgcacgcgccgtaggcggagttgaacgagaacagcgccggctgcgggtccgcatagcgcaggtcgctgtcggggctgtgcaggccggtggaaaagcgccatacggggccctcgtcgccgtcagccagcacatagatgttgacgcggccgccgccgcgcttgagcgaagcttcgatcgcctccaccacgcgcaccttctccgcattgccgatgcggaagcggtccgccaccacatcgagcagcttgcgtgcgccggtgggcgactgcaccacgcgctgcgcctgcacgcgcgtatagccgctgaccgacagccactgctggacctcatcgtcggtggcggactcgggcagttcgaccgggaaggtcaccacgaggcgcgcgtcgtgatgcggctggccctcggccgtgcgcgccagcagctcggcgtagatggtttcgggcgagtcatggcgcaccggcagcgcggtctgcttgtcgaacagctccgccgcgcgcgcatagagcagcttcaggtggtcattcagctccgtcatcgtgcccaccgtcgaacgcgagctgcgcaccgggttggtctggtcgatggcgatggcgggcggcaccccgtccacgcgctccacctggggccggtccatccggtccaggaactggcgggcgtaggcgctgaaggtctcgacgtagcggcgctggccttcggcatagagcgtgtcgaacaccaggctggacttgcccgagccggacggcccggtcaccacggtcatctcgccggggcgcaggtcgagatcgacattcttgaggttgtgctggcgggcgccgcgaatgcggattagctgcttgctcgacacgatttctcttttcgaatcaggacgttaaggaggagaccggggacggtccgaccactgtacatccatacagtctatcaggttggaaaagaattggtatcgatcacgtcgcacggaatcagacaagtgacggtgcggtgcgagaggcgagcggctttcatgaccgttcgcgccaggccaaagcctgactttcgctgcattgctatttatcgattaccgatatacgatatgattcagtcattcagatgttccgacaccgctgaactgttcgcgggccgctgtgtaccgcgcttcggcaatatccgcgccgtggccgaacgcaagctgcggctgctgcagagagcgtcgacgctggagttcctgcgctccccgccgggcaatcgcctgcagttgctgaccggcgaccgcaaaggccgctacagcatccgcatcaacgagcaatggcgaatctgcttcatctggacccacgacggccccgcggtcgttgagatcatcgactaccactgaggaagacagacatggttcgcttcaaggacggcatgcgtcccatccacccgggcgaaatcctgcgcgaggatttcctggtaccgctcaacatgagcgccaacgccctggccctcgcgctgcgcgtgaccgcggcgcgcatcaacgacatcgtccgcgagcaacgtggcatcacgccggacaccgccctgcgcctggcgcgctattttggcggcgatgcgcagtcgtggctgaacctgcagctggactatgacctgaaggtcgcgcagcgcgaccacggcgagcgcatcatggcggaagtggcgccgcgcgatgccgcggcggccggtcaaccggccgctgaaaagtagaaaacggtattgccggggcggcgctgcccacgccgccccggggccatctccctatcgcatcagcgtttccgccagcgcccggaaagcacggaacgtgatcggattgttggccgcgttgccggccacggggtgcgacgcgtatcgcacgatggtcagctcggccttggggtcgatatagatgcgctggccatggatgccggcggcctggaacatgccgtggctgtcgtgcgagacccaccacatgtcgcgatagctccagcccggcagcaccggcgcgctggccgacctggcaaactggtcccggtcgccgccgctgcggatatccgccacgaccgaggccggaatgatctgcttgccattgaagcgcccgttgccgcggatggtctcgccaaagcgcgcaaggtcgcgcagcgtggtgttcagcccgccgccgcccgactccgtgccgatgctgtccacggtgaagtacgcatcctgctccgcgcccatcggttgccagatccgctccgagagcagcttggccagcgactgacccgaggccctgcgcacgatccacgccagcacctcggcattgaccgtcttgtaggcaaacaccgcattgtggtcgccttccttctgcagggtcttcaggaagtcgtagaacgtccccgggccgctgtagcccgccgggcgggccagcatgccgcccgcacgcgcgtagtcccacacctctgccttgggattggcatagtcctcggagtagcgcacgccgatggtcatgtccatgacctgccgcaccgtggcgtcaccgtaggccgtgccagccagttcgggcaggtagcgcgtcaccgatgccgccgggtcgagcttgccgtcggccgcgagcatcgcggccagcgtgccgacaaatgacttcgtgaccgacatggcgatatggggcgtgtgcccgtcgagcgcgccgaaatagcgctcatagatgaccttgcccttgtgcatcaccaggatgccgtcggtgtaggtcagcgccagcatctcgtcgaaggtgcggcgggtgccgtccgcatcggtgaactgcaccgagccgacatcccgttccgcacgcggcagcgcgctggccgggccggcgccgcgccagacggacgcggtcggcaccagttctcggatatgcgagaacagccagcgattgcgcggaaacctgtcggcgcccggcgtatgcgtgatcagcttgtccggcggcggcgggaagccctgcatccagcccaggcggttcgggtcgctgtccagcgctgcgaccagggtcggcgccgcggctgccggggcggccacactcccggcagcgctgccggcgctctggctccaggccggcaggctggccgcgcacagcgccatgcatgccaggcggcgccaggggcgcgaggattccggataggtcttcaacgacatgctgtctccttgctttgttttgtttgagggattgccgcgcgcggggctagccagcctgcgcatccgcgccctgctggtgctcgatcaaggccgcggtcagcttgtcgatgcagcggtccagcgtctgcacttccgcttccgtcagcaccgagaggaacatcttctccagcatgtcgccgcgctggtacgtccgtgcgaccagtgcttcgcccgccgcggtcaggtaaaggttcagctgcctggcgtcggcctcgccgacttcacggcgcagcaggccccgctttgccagcgcggtgaccagcttggaagtcaccgttttctccagcaacaccagttcgatcaggcgcgtcagcgtcaggcccggctccagcccggcaaaacgcagcacacgcaactcccgcaggccgatgccgaactcgcgctcgtaaaagccggaggcggaactcttggtcatttcgcaaaggcggttcaggcgaaacgacatgaattccaggatggaatcggtggtgctggcagtgttggacatgggaacgggtgatcaggcggccgatagattctatgggcaatagtttccatgagcaactaaccaagggtaagtacggttcttcgcgcgatcgccgggcaaaagaaaaggcccgccccaggattcctggcagcgggccggtccaggcagcgcggcggctgcctgcagcgctcaagcgcgatcaatcgagcaggtgccccatgcgcgtgcgcttcgtagccaggtacttctcgttctcggcgttggacggcacgatgtggcgcaactgctcggtaaccgtgatgccggccttctcgagcgctgcggccttgagcggattgttgctcatcaggcgcacggacttgacgccccactggtgcagcaggtcggcggcgaaggcgtagttgcgtgcgtcgatcgcctggcccagggccaggttggcgtcgaccgtgtcgagcccgccgtcttgcaggcggtaggcgcggatcttctcggccaggccaatgccgcggccttcatgcccgcgcaggtacagcaggatgccgcgaccttcggcggcaatcttttccatggcgagctcgagctgcggaccgcagtcgcaccggcaggaaccgaagacgtcgccggtcaggcattcggaatgcatgcggatcaggacgccatcgcccgtcacatcgcccacgctgagggccaggtgttcgatgcctgaatcggcgcccttgaaggcgtgcgccgtaaagtcgccgaatcgcgtcggcaggcgcgccgagtcgatcagctcaatttctgtgtcattcataccggaattcttggtcaaaaggcgggggcgcggcccggcaccgccgacattatgagcggaattgcaccttcgcgctcggattccccgccgtggcggggcgggacggccgtcggcgaagtcctacagcagtacgcgcaatccccttatgcagccgcttcaagcgggtcggtagactcggtttacaggacatcgccggagccgttccaggcgacaaaaagcgcagtgcgcatcacctgacggcggcccccggccccagcaggagcaggccatgaccggtaatcccttgaacgctgagcaagccagtaccaagatcgcagcactgttcgataccaggtcggcagccaacgacgccgccgaacgggtctgccatgaggcccatctccggcgcgggcaggtgcggctggtgcatccatacgaagcgcacttcggccgcaagctggagcccgagaacgacgccatcgcgcgcaccgcggtgcgctcgcacctgatgatgggtacgctgggcgcggtggtcgggctggccattgtcggcatcctgcaccggcagggagtcgaggccgtcatggacagcccgggattcgcaatcggggcggccctctttctgggcatggtgttcggcatgctgttggcggggctggtgaccgcacgaccggaccatcaactggtaataacgccggtgcgtgaggccgtgcagcatggccgctgggcgctactggtacacccgaccacgccgcagcaatgcaacgaggctatgcgcgcgctgcgcaataccaccgccgaggtgctcaggacagcctgactagctgctcagggctcgaccgaaggctcgcgcttgagcgtgcgcagcacaaaggtcgagcggctgtggcgcaggccaggcagcttgtatagcttgtgccgcaggaactcctcataacccagggtccccgccacggcgaccttgatcaggtagtcatattcgcccgtcagcaagtgggcctccatcacctcaggcaattccgccagggccttgccgaagcggtacagcatgtcgtcgtcgtgccgctccagcgtgacctcgatcagcacggtatccggcaatcccagcgccttctggttcagcagcgcggcgtagccttcgatcaccccgctttcttccagcgcgcgcacacggttccagcagggcgtggccgacaggccgacttgctcggccagccgcgcattggacaggcggccatcgcgccgcagttcacgcaggatgcgccggtcggtgtcgtcgagtttgggcggctgtgccatcgcaatatctacaagaaaagaaacatccttatattctgccatgaatggatgtttattctccaatagaagccatatcgaagaaaatttagaagccaattttgcgtaacggctggtaaatttaccttatcgaacgacctgccggaaacaacacatgccagccaccaccctccccaccttgcacctctcgctgcgactcgaaaccgccgacctgttcggcgccatggaatgggtgctggccaatgcgcgccgtaccggcctggcgcccgcgcaactcagcttcgacgcggcccggcaggccgtgctgcatgccaccctgacggcgcaggatgccggccagctgtggctgttcctgcgccgcctcgacaatggtttcgacgtggaactgctgtttgccgacgtggatgaccccgacagcgacgccgtggccgagccggcaccgcgcgccgccatgcgccgcaccaacagtgagccggccctggccctgcccgcgtgaaccgcgcctaagcagcctgcggcagcagttcgatcccatcgagctgcgccgcgcacgtatcgcgcacgatcgagacaaagtccgccacgtagggcctgcgcgccatcgccgccggcaccgtggcatagagctcgctccacaagcctctggcaccgatgcgcttggccagcacgtagtcgtggtcgacgtagttcttcaccccccagttgggcagcgccgccacgccgcggcggctggctaccagctgcagcaccgccaccgtcagttccgccgtgcgccgttccaggtggatgcccgcgggctccagcacctcgcggatcaggtcgatgcgctgctcgggcaccggataggtaatcagcgtttcgccggccaggtctccggcttcgatgcggcgcttgttgcgcagccggtgttcattggcgatgaccgccaggatctcgaagcggaacagcggcgccacctccagcccgcgtcgggccgccggctgcgagcctatcaccatgtcggcgcggccgtcgctgagcagcgcgatcgggtcggcgtggaagcccgccaccagatccacctccacttccggccagcggcggcggaactcgtccatcacgggcatcagccagtcgaagcaggtatggcattccagcaccacgcgcagctcgccacgggtgtcgcccttgagccgttcgatatcgcggtcggcggcgctgaccgcggccagcacctcgcgcgccagcgccagcaggcgttcgcccgccggcgtgaagcgcagcccctggcgcgtgcggtcgaacagcggcaggccgtagtgcgattcgatcgccttgatctggtgcgacagcgctgactggctgacatgcacgcgctcggccgcggtggccagcttgccggactcggcaatcgccaccagcgagcgcaaatggcggacttcgatcatgcggcgcccccaacctgttgcccgtctgtcttgatatgaaactcattcatatgttgtttaaaacttgtcgcttgattcattttacgggcaaaccgacactgtgcgccagacatcttccggagcaacctccatggcacgcacccatatcctcggctttccccgcatcggcgaacgccgcgaactgaaatttgcgcaagaagcgttctggcgcggcgatcgcaccgaagccgagctgcgcgacgtggccgcgcaactgcgccgccgccactggcagctgcaggccgaccgcggcctggacaccgtggccaccggcgactttgcctattacgaccagatgctgagcctgaccgcgctgctgggtgcgctgccgcgccgcttcggcttggatccggcccggctcacgctgacgcagtacttcgagctggcacgcggcaaccgcgagcagccggccatggaaatgaccaagtggttcgacaccaactaccactacctggtcccggagctggacgccgagaccactttcgacggcggcccggcctggttcttcgaggaagccgatgaggcgctggcgcttggcctgcgcgcccgcccggtgctgatcgggccggtcacctacctgtggctgtccaagagccatgtggcgggcttcgaccgcctggccctgctgccgcaactgctgcagggctatcgccgcatcctcgaccagctcaaggcgcgcggcatcgaatgggtgcagatcgacgagccggccttgtgcctggacctggagccggcctggctcgacgcattcgacaccgcctacgctgccttgcgcgaagccggccccaagttgctgctggccacctatttcgacaccgccgccgaccatgcgcagcgcgccgccgccctgccggtcgacggcttccatatcgacctggtgcgggcgccggaacaactggccgcatggcaggccgcgctgcccgcgcacgccgtgctgtcgctgggcgtgatcgacggccgcaatatctggcgcaccgacctgcgccgagtcctggacacgctgcgcccggtgcaggccgcgctgggcgagcgcctgtggctggcaccgtcgtgctcgctgctgcatgtgccggtgtcgctcgcgcatgaagtgcgtctcgatgtcgagctgaagtcgtggctcgcctttgccaccgaaaagctcgacgagctgtccgtgctgggccgcgcgttgaatcaaggcgacgccgtggtcgccgaagcgctggcagcatccgacgccgcgcaggcctcgcgccgcgcctcgcgccgggtggtcaacccgcgggtgcagcagcggctggcagccgtgagcgccggcatggccgaccgcgccagcccctttgccgagcgcatcgagcgccagcgccaggcgctgcagctgccgctgttgccgaccaccacgatcggctcgttccctcagaccgcggccatccgccagacccgcgccgcgttcaagcgtggcgagatcggcgcgctcgaatacctggagcgcatccgtgccgagatcgcggtggccgtgcgcaagcaggaagcactgggcctggacgtgctggtgcacggcgaagccgagcgcaacgacatggtcgagtacttcggcgagcagctgtgcggctacggctttaccgagaacggctgggtgcagagctatggctcgcgctgcgtcaagccgccggtgatctacggcgacgtgtaccggcccgagccgatgacggtcgataccgcccgctacgcgcaatcgctgaccgagcggccgatgaagggcatgctcaccggccccatcaccatgctgcagtggtccttcgtgcgcgacgaccagccgcgtgccaccaccgcgcgccagctggccctggccatccgcgacgaagtgtgcgacctggagcaggccggcatccgcgtgatccagatcgacgagcccgcgctgcgcgaaggcctgccgctgcgccgtgccgactgggatgcctacctggactgggccgtcactgccttccgcctgtcggccagcggcgtgcaggaccagacccagatccacacgcatatgtgctatgccgagttcaacgatatcctgcccgccatcgcggccatggacgcggacgtgatcaccatcgagacctcgcgctcggcgatggaactgctggaaggcttcggcgacttcgactacccgaacgagatcgggccgggtgtctacgacatccactcgccgcgcgtgccgtcggtgcaggccatggagcggctgctcgaccgcgcctgcgaggtggtgccgccgcagcggctgtgggtcaacccggactgcggcctgaagacgcgcggctgggaagagaccgaagcagcgctggccaatatggtcagcgcggcccgcgcgctgcgcgcgcggctgtcggcgcggggcgcaacgacctggaagcgcctcagcaagcctgcagccgccaccgccgcggcagtgccccacgccggcaacgcctgcacggcctgcgccacgcacgcgaactgagacggcgtagcgccaattgcgctggcaggaaaagacaaaggccgcatgcccctcacaggcatgcggcctttgtcctcgatggcggcctcgtcagtccacctgcatcaccgccggcggcatccagttgccgtccagcagcacctgctccggccagtacgcgcgcagcatcatgttcaggccatcgggcggcgccggcagccagttcgccgccttggcgccggccgggcgctcgtgctggatatagatatcgagcgagccgtcgcggttgtagcgcaggcggtcgcggctgcccacggcgtagcgctggatcgggttgggaatgaacgcctgccggtcgttgtacagcgtcagcgaccagaacgcgcgcgccggcggcaactggtccttgtcgaaatgcagcacatagcgcgccccgccctgcagcggcttgccgttggcatccgtgcgggtggaggcgtagatcgcgtcttcgggcaggttggcacccaggcccacccacgcggtcaccgcgcggcggccgtagctggtgccataggtgcccaggtcgcgatgcatgacccagccgttgccggcatcggcattgcccttgcgcgcaccctgaacgatcgcggccagcgcagcggtagcaccctcctgcaccgcgcgcgcggtggagggctccatcaccgtggtcttaaacggcacccccggggtgatgcccatgcggcggagcttgtccaccatggcggcatcggcgggcgccggcggattggccggcagcaaggcggcaaagcgcgtgaagaaagcctgtgcatccattgccgccaccagctccacgggcgagctttcagggtcgatggccgtgggccgcggcgcggccctctccggcacgcgccgcccgccaccccaggccgacagcggcgtcagccggtactggtcctggagccggtgcaccgccgggaagtcctgcttgccattggcctgcgtacggccgatcaaccagaccatcgacgtgggcgaacggatctcctgcatgcccttgggcagcgtgccgcgccagtcaggcccggtgatggcgaagttgccgcggcgggtgccggtggtgcgcttgcccggcgacgcgaacacattggtccacgcatccatcagcggcatcaggtagtagcgcccgtacgtatcgggcaccgacaggatgaccggctccctggacaggtcgagccaggccgacgaatacagcgtgtcggcgttggggctgaccacgtcggtgaagctggcgtccgggaaggtgcgcttgtggtggaaggtattggccggcgtgcgcagcgtcatcagctcgcgcgtcacgtccatcagcaccatcggataggcgaaggtgaagacctcggcggacaaggccttcatcgcctggtcggacggcggttgctcggcgactgccgggctggttccgtgatccggcgcggacgcacagccggacagcatgacggcaagcgtgaccgcgctcgccagttgacacaaggatggcttcatgaccccgttttcccaatgtttttgcggcttttcgggtgttgcggctatgactgccggcatgtcgtcccgaaggcgcatctattccgtgcgcatcttgtcccgcgcgccggtgacctgtcaattcctctgaagccgggaagcgagggcaagcgcaccgaacgccggcggcatcggtcacgggtgaatcatgaagcactatcaggggtgatgaaagccgcacgcatggctcggcctttccgcctcagagcctcagcgcgttaggaaatccagcaccaccttgctgaacgcctcggcctgctccaggttggagatatgtgcggcctccagctcgacatagtgggcgcccgggatcgtctgcgccaggaacacgccatcgcgcggcggcgtgggcaggtcgcccgagccagcgatcaccagtgtcggcgtggtgatcttttcgatttgcgcgcgcaggtcggcatcgcgcaccgccaggcagttggccgcgtagcccgcagccggggtggccccgagcatggcgcgcagcgatgccaccagccccggatgcgcggccgcgtacggcggggtgagccatttgtcgactaccgcggcagcgatcgatgccacgccgtcgcgcccgaccgcagcggcgcggttggtccagttctccggcgggccgatataggcagcggtattgcacaacaccagcttgcgcaggcgcggaccatggttcagggccagccacatgccagtgatgccacccatcgacaagccgcagaaactggcttcgccgatgccaaggtgatcgagcaacgcgatcacgtcgccgccgagttgcgcgatgctgtacggacccgccggcaccgacgactcgccatggccgcgcgtgtcatagcgcagcacgcggaagtgctggctgaaggccgccacctgcggctcccacatgctgaagctggtgcccagcgaattggacagcaccagcaccggcaggtgctcggcgccatcgaggcggtaatgcagtcggaggttggcgaggtcggcgtatggcatggcgtttggctcaggatcaggtggctggatggcaggcgctcagttcggcgcgatggccgaaccgtgttgcgccagcggcgtgaccttgatctccatgtacgggtacagcggcagcatggtcagcagcgtgtgcagttcgtcgttgtcgccgacatcgaagatgctgacgttggcgtactggcccaccacacgccacaggtggcgccacttgccttcgcgctgcaggcgctgcgacatggccttctcgtcggccttgagctgctccaccagttgtggatcgagcgatgcgggaatcttgacggtcatttctgccatgaacaacatggggtctccttgtccgggggtatggtgggatggaggcagcgcgggctgcctcgtcaaagatggcgcacgccgtcgagataggccttgcgccagcgcacgatgcgcacctcggcaaacaaacccgcctcggtgaacggatcggcgtcgatgaattgctgtgccgcgtcgcgggtgtcgacatcgacgatatagatgccgcctccggcatccgagccatcgtcgttgagcttggcgccgcaagccagcagcaagtccttgttggcttccaggtaatccaggtggctggcacgggtggcctggcgcacatgctggtgattgggcttgtcgacggtttcgatcaggtacggcatggcaatcctcctgtcagcggcacgctggccgcgggtcaaagtcaggcaatctgcgcgccccacagcagcagcgcggcaatgtagatcaggcccacccagaacatcatgatcacggtgtagcccatcacgtccttcaggttcagcctggacagcgccagcgccggcaatatccagaacggctgcaccaggtcgttccaggcattgccgagcatcaccgacatcgaggtctggctgaccgagctgttgatggccttggccgcatcgaccatgaacgggccctggatcatccagtggccaccgcccgacggtgcgaagaagttgatcacgaacgaactgagcagcccccagaacggcagcgtctgcggcgtggcgatctccacgaacacacgcgagatggtatccaccagccccgagccggccatgatcgccatgatgcctgcatagaacggatactgcaggatgatgccggaaatggtcttgatgccttcgttcagcttggccacgtagttgaccggcgtgcccagcagcagcacgcccgcgaacaggatcaggaagttgatcaggttcaggtcgagcgagccgccctgcgtgaagtagatgaccgcgtaggccatgccgcacaggccgatggccaggctcaggatacggctgttgttcaggcgcgcggccagggtgttctcgccgcccatgctgtgggccgagccggcctcggccttggcgggttcctggtcgcggcggatctccaccacatcggccgggttgcgcggatgcagccaggcattgagcagcggcagcgtgacgatcaccgccaggctggtcagcagcatcggcgtggagaagatggtttcagacagcgggatcacgcccatcagcttttccatcgggtggcccggggtggagatcagcaccgggatgctggccgacaggcccagcccgtacagggtgaagccgctgtacgcggcggcgatgatgagcgggtaatgcacgccacggaccttcagcgccagcttcctggcgatgatgccgccgatcaccagcccgaagccccagttcaggtagctgccgatgccgcccaccagcgtggcgacgatcaccgcggtgcgcggcgagtgcacggcactgacgatgcggtcgagcatgcggtcagtgaacggcgcggtggccagcacgtagcccatcgccaggatcaccgccatctgcgtggtaaatgccagcaggttccagaaccccttgccccagctggcgatcacggccggcgctgcctgcccttgcaccgtcaccgccagcgccatcgtcagcaaggtcaggccgatggcaaatacaaagggatccggcaggtaccggcgcatgagttcggtgaagaacccggcaatcttgctcatagcttccttgtctccagtttcggccaaagttacgccactagaactacagttctatatgcgaacttcaaaaatacgcgtggctatgctaagagccggtcgaccggttggtcaaggaaatggggacgcgcgattacattcgtttcgcgcaacaattcttgaatgaggcctggaattttctacgcaggccatgcaatgcggacgatcggcaggatcaatagcgcatctgcacatcttcgaccttgcccgtacgcgcgttgtacaggcaggcgtagtagaagccgatcgccgacgaactgtcgtcaggctcgaacacgccttcgccattgaccgaggtttgcgcattggggcgcaggtagtactgctcgcggtcggccatcagcatcacgctgccgggctgcgggtagcggcgcttgagggcttccgccacggccggctcgcaggccgtggacgcggccctggaagcggcttgtggatcgacggtgatgcgggtggtggccgggggcacagggcgcggtgccatctgcggcggcgtttcgcaggcggccagcaggcacaccagcggcaggcacaggcaagaagctcggatcacgcggacctcctcagaaggagggcgccggcaacgggcaccccaaaaagtgaagcggagctatcaggttactgcctctggccggaaaagccaaagccggcgcgcccgggcagcccggcaatgccccgccgatagcgaatccttgaacgcggctaaactatggcacgcggcagcgccccgggttccggccaggtgcgtgccgccagcacaaccacgatgccgacacaatgacaaccacagagacaagcggcaaccgccctgccacccctgctcccctgctgcgcaccgccgccagcctgctcgtcgtgcgcgatgcgccggccggcatggaagtgctgctggtacgccgcgtcgaacgcgccaacgaccgcagcagcggcgcctacgttttcccgggcggcacgctcgacgcgcaggacaaggccctgcacgcgcatgcccacggcctggacgacgcccttgccagcgaacgcctgggcatgccggccagcggcctggacttctacctggccgccttgcgagaatgctatgaagaggccggcctgctgtttgcctgtgaccgcgacgggcgcccgcattcgccgcaccagctcgacgccgccggccaggcgctgctgcgcgaggcagtgcagcgcggcggccccggcctggcccacgcttgcgagcaactgggcctgcgcctggcggccgaccggctcgcctatcacagctactggctgacgccccccggcctgcccaagcgtttcgatacccgcttctttgtcgccatcgcccccgaaggccaggtggccgtgcccgacggcaccgagatcgtggagcaccgctggattcgccccggcgaggccgccgatcccgccagcggcctgccgctgatgcacgtcacgcgccgcacgctgagctcgatcgcgcagtttgaaagcgccgcggcctgcttcgcttattactcgcagctgcgcggcattgcctgcatcatgccgcggctggccaccggcgcggccggcgtgcgcccggtgatgccgaacgagccgtgctacgccgagatcggccgcatcgatcccgacggcaacacgcacggccgttatgagctggtaccgggcgtgccggtacgactgtccgagcgcgtctggcgcgtgaccgccaacaacggcaacgtgatgacgggcccgggcaccaacacctacctgataggcggcggcgcgcgcaatgaatgggccgtgatcgatccgggcccggacgatggcgagcatgtgcgcgccatccttgctgccgcacccggcccgatccgctggatcctcgccacgcatacccacctggaccattcgcccgctgccgccgcgctgcaggccgccaccggcgccacggtgctcgggcgtgccgcgcctgccggccagtggcaggacctcagcttcgagccacagcgcgaactgaaccacggcgagcgccttgccatcaccgaggactgcaccttgcgcgtgtgccacacgccgggccacgcctcgaaccacctctgctacctgctggaagaagaacagacactctttaccggcgaccacgtgatgcagggctcgaccgtcgtcatcggcccgcccgatggcgacatgcgcgcctacctggactcgctcgcagcactgcaggatgaagacctcgactggctggcgccgggccatggcttcctgatcgcgcgcccgcaggacgccatccgcatcctggtccggcaccggctgcagcgcgaggccaaggtcgttgccgcactgcgcgaactgagcccggcaccgatcggcgagctgctgctgcgcgtctacgacgatgtgccgccgcgcatgcatccggttgcgcagcgatcgctgctggcgcacctgctcaagctgcgcgatgacggcaaggcgcaggaagcggacggcatctggtcgaacgccacggcgtagcaccggcgcgggcatcggggccagttgaagatttttggcggggggcttgcgcaaaccagaaattgcgctacaatggcgcctctcgtgtgcggctgtagctcagttggatagagtacttggctacgaaccaaggggtcgtgggttcgaatcctgccagccgcgccacctatgcagaaagaaaaagggcttccggaaacggaagcccttttttcattgcggcgctcgcatttggcgccaccctccccactaccaccactaccaccgatagcgcgccccgaccgttccgcccgggttgcgccccgccctcaccttgaaccacagcttcatgccggtcgatgtattgccatgcgcgccgatgttgaaggagaacagcccgcgcagcaggtcggcatcgatcttggtgccgttgatgttgatgacctgtttgcggctgtcctgccaccagtcagcctcgacaaagggataaatgccggccagccgcgtcggctgcgcgccgtacaggcgcacgccgataccggcggcgctggcatcgccgggcatggcttgcatcggcatgccggagacgggagacatgccaggctggtaggccagctgcaagcgcggctggatggtcagcccgcctgcgcgcggcaccacggcatcgaccgccagcgccatggtgcgcatgcgactgtcggcaaaaccgcctgcgctggtgatgtcatccaggtgcagcgacacccggcgcgggcgttcggccatggcggcggtttcacggtcgaccgcggcaaggccgggcgcatcgtcatcgggcccggggcccatggcaagcgttaacgcggatggggatgactgcgacggcgcggcatactcgacggtgacgggctcggcgggcgtggcggaccaggcaggagcagcggtgtcggcaaccagcagatcgggcacgtcggccatggcgggctgcccggcttgcgcctgcagcggctggtcccagccggagacgccctggctttccggaacggcgtcatctgcatgggccagtgcacacatcagcatggccaggatgacgctgtactgcaggtgatgcaggaccatgccgtgatgcgcggcacatacgtgccacccggggcaagtccccgcctccctttctctcgatgacaagaccgtagtcatggcaaccaccttcggacgttatatgtgcctgcccgatgagttcgagcataggtcaaatgccctgccagcgttagccgggaatgttcggccgcgcgcgccccgtacgaccctgtcagtgagcaaattcggcctggccgctgcgccttttcgtcaataatggcggtaatgacaaatcttgcagacatcgcccggcaagctgccgccgggagcaaaccttatggccttgtggcaacgtgcgcgccggcgtgagtccgaacccgggggcatggcaccgccggccggacgcagccgcagcctgaagcgcaagctggcgatcgccacggcggtcggcgggctctgcaccctggtgctcgccgcgctggtgatggcccgctcgtatggcgacttcacctcggcgcggcagaacctgtacgacatctcggcataccgcgagctgctcgaggccgccaacgtgctgtccgcggaacgtggaccggccaacagcgtgctgggagatccaccctcgcccaacacctccgcgcgtgagcgcctgcaagcgttccgcgcccgcagcgacgccgcgctggcgcgcctggccgcgccgccgccggcacccttcggcctgcacaaccaccacctgccgccgctgatggtcgagcgcgtgcgcgaacgcctggcgcgggcgcgggccgagatcgacgaactcgccgggcggccgcgccaggaccgtgacatggacgagatccgccatgccatcgaaagcatgttcgaggtcgtggacgcgctgcagccggccatcgcctggcaggtgcgcgaactgtccgcctgcgacgacggcctggcggcgccggcgctgaccggcaggatgctgggcgacctgcgcgagtatggcgggcgcatcgcctcgcagatcatggcgcccgtggcggcgcgccagccgatgccggtgcagagcctggtggacgccacgcgctcgcgcggccggctgctggagctatggcagctggcggggccggcgtacaacatgttcggcgccgtgcccgcgctggagcaggcatacgccgacgccggccaccagttcttcggccagggcctgtcgatgatcgacagcctggttgcgcagggccgcgtctcgggcaattactcgatgacgccgacggagctgaccaaccgctacgtgcgcacgctggagccgctggagcggttgcgcagggtattcctggacgaggtggtcgcgcatttcaccgcagcgcgcgcacaagcgctgcgcgaactgacggcagcgtgcggcacgtcggcgctgatccttgccgtgctgggctacgtgctggtgttcatgcagcgctcggtgatcctgccgctgctgcgcgccggcgacgaagtgatcggcctggccgaggcgcgcgaacacccgcactacgctgcgccagcggcgtccgccaggcccgcggcggagatgcggcgcctgttcgatgccatcgagatcctgcgccgcaagctgcgcgagcgcgcctcgctgaccgaacaactggaacaccaggcgcgcaccgacagcctgaccgggctgctgaaccggcgcgcgctggagctggtggccgcgcagtacgcggcacacgacagcgccagcctggtgctgatcgacgtggaccgcttcaagcagatcaacgaccgccatggccatgccgccggcgaccaggtgctgcgcgacatcgctgcgatgatgcgcgcgctggtgccgcccgaaggcgtgctggcacgcttcggcggcgaggagttcgcgctgctgctgccgcacggcaggccgggcgaggccgccgcgctggccgaaaccctgcgcgcggaaatcgcgtcgcgcccggtcttcctgtcgggcagcacccagctgtgcgtcaccgccagcttcggcgtggccatcgggcgcggcggcgagcgtcactggcagcggctgttcggcgcggccgacgctgccatgtaccgcgccaaggccgaagggcgcaactgcgtgcgcgaggcacagcgcgaggaaggggtggcagccggctgaagcaggccggccccggcaccagcacggaaacgatggacgaaaaaaacccgcatcgctgcgggcttcttccacatatccggcaccgccgcctcggtatcgaatggcggtgacccggtcactcacgccgggctaaaacgaagaaaggctcgcttgcgcgagcctttctaaatattggtgcccagaagaggactcgaacctccacagtgttgccaccgctaggacctgaacctagtgcgtctaccaattccgccatctgggcttcgtttcgctgcattgctgccgcgatgcgaagaaagaaattatgccgagcgcgtcagcgactgtcaacaccctgacacaaaaaatttgtgatccttattgcccgccgccgcgccgcaggaaatccacctgcgccggccggccaggcaggtccagcgcagccatcgccggaggcatgctggcgatggtcttgccggcacgcagcacccgcagccgcgtggcgcgcaggcggatcgcctccaccgggtcgcgcgcctgcagcagcaccaggtcggcgcggcagccaggcgccacgccgtagccatccagcccgaggatctgcgcgggcatggcggtcacggcggcgaagcacgcgcgcatggcttcctgcccggtcatctgcgcgacatgcagccccatgtgcgccacttccagcatgtcgccggagcccaggctgtaccacggatccatcacacaatcgtggccgaacgccaccggcacgccggccgccagcaactccggcacccgcgtcatgccgcggcgccgcggataggtatcgtgccgcccctgcagcgtgatgttgatcagcggattggcgatcgccgccacgccggcgtcgcgcatcagcgggatcagcttggatacgtaatagttgtccattgaatgcatcgaggtcaggtgcgagcccgccaccctgccctgcaggccgagccgcacggtctcgctggccagcgtctcgatatggcgcgacagcgggtcgtcgctctcgtcgcaatgcatgtcgacgcgcaggccgcggtccgccgccagctcgcacagcagccgcacagattcggcgccctgcgccatggtgcgctcgaaatgcgggatgccgccgaccacgtcgacgcccatgtccagcgcgcgcttcaggttgtccagcgcgccgggcgcgcgcagcacgccgtcctgcgggaacgccaccagctgcaggtccaggtaggggcgcacgcgctcgcgcacgtgcagcagcgcctccaccgcgagcagccgcggatcgcacacgtccacatgcgagcggatcgccagcagcccgcgcgccaccgcccagtcgcagtaggccagcgcgcgctcgaccagcgcgtcctgcgtcagcatcggcttgagctcgccccacagcgcaatgccttcgagcagcgtgcccgactggttcacgcgcggcagcccgtacgacagtgtggcgtccatatggaagtgcgcatcgacgaacggcggcgtcaccaggtggccggccgcatcgatctcgtcggcggcgtgcgcggccagtgccggctcaaccgcggcgatgcggcccgcggcaatgccgatatcgatgtcggtgcgcccgtcgggcaggttgcagtgccgcaggatcaggtcgagcatggaggtctctcaggcaggaggcacggcgatacggcgatgttctcacggcgccggctccggcgccacggcgtcatgcgcgccggtcgggcgccgcgggctcggggtcgagtccgcagccgcgcagcagcagcgccaccaggtgctcggtggcctgcgcatagtcccgctgctccagctggctgacgccgagcaccgcgcatacctgcgactcgaaatccgcataggtctgcgtggccgcccagatcgtgaagaacaggtgctgggggtcgaccggcgccatctggccgcggtcgatccactgctgcaccaccgcggccttgcgcgacaccagttcgcgcagcacctgccgcaggacctcgccgatctcatgcgcgccgtgcagcagttcgttggcaaatacgcgcgatgcatccggatgactggccgacagccgcatcttggcgcggatgtattgttccagcgccacctgcggcggcagctcggcgcggatgatgtcagtctccgacagccacagctgcagcgtatgcgccagcacggcgcggtacagcgcctgcttggtgcggaagtagtaatgcaggttggacttgggcacgccggcgcgcaccgcgatctcggccatggtggcgccggcaaagcccgcgcgcgcaaagacatgctcggccgcgcgcaggatcatggcctggttctcctgccggatgcgcccgcccggcgcatcgcacgcgggcagcgggcgccgcgccgcggcgctggcctgcgtgtccatcagcgcgtgccgtagaggcggtcgccggcgtcgcccagcccgggcacgatatagccgtgctcgttgagcgtttcgtcgatggccgcggtgacgatgccgacctcagggtgcgccgcgcgcagcgcgcgcagccccgggcgcgaggcgatcaggcacacgtacttcatggtggtgacgccggcctctttcaggcggttcagcgcggcaatggccgagttgccggtggccagcatcgggtccaccacgatcaccatgcgctcctggatgtcttccggcatcttgaagtagtactcgatcggctccagcgtctcggggtcgcggtacaggccgatatgcccgacgcgcgccgccggcagcagctccagcatgccgtcgataaagccgttgcccgcgcgcaggatcgacaccaggcacagcttcttgcccgacagcacccgcgactgcatcggcgcgatcggcgtgcggatggcgaccgtctccatggccaggtcgcgcgtggcttcgtaggtcagcaactggctgatttcacgcaccagccggcggaagttgtcggtggtggtgtcctcgctgcgcaccagggtgaccttgtgctgcaccagcgggtggtcgacgaccagcaccccggccaggccggcaggatcggcatcgagtggttcaacagcgggaacagcggacatgtcgttcatggtgacgctccagatgccaggtttcacacgcaatgcctgccggcaaggtcggccgcctggcggccgaccttgctcagaacaccgtgccgtcgctgatgatggcgaacggcggcgcgccacccgggcgccgcttggcggcaatgcggcgccccgccgcccaggtgccgccttcgagcacgcgcgccagcgggaaattttcttcctgcaagccaagcgcctggcgcacgccgtcggccaccaggtccaggccggtcacggtcagcgcgcgccattcgacgatcacgggctcatccaccgcatgcggcacggcggcaaagccggggtcgcgcggcaccatcagctcgaagtcgtagagcaggccgccgttgcggtattcgggcaggcccgtcagcgcgtccagcccggtcacggtcaggccggcgtcctccagcggctccagcagcgaatacgtcagccattgcgtgagcttgtggaacggcaccagcccgcccggcgcggccggatgccgccagcagtcgcccagcgacacgccttcgacaatgatccgccccggccataccggccccaggccgaccagcagcgtgcgcagcaggaagccggcgtcgaggtgcccgttgaccgcatgcgccttcaggtagtcgtacaggttgcccagccgtgccggccggccgaacagcgccggggtcgcctccatcacctcgccgaggcggcgcagcaggccggcgcggccttccagccccaccagcgggttgtgctgcgcgacctggaaggcgtgggcgatgctgtcggcatcgatgcgctgcagccgctcggcgtccgcgcgcagcggatcgcccggcgcggccgagaagccgccgcgcgcgaacaggtcgaaactggccacgcccagcccttccgagcgcgtcagcaccaggtcgctggccggatcgcggtaacgccagtcagggccggcgccggcatcgagcaatacgcttggaatcaccaggtcaatgccgatgcgggcgcgctcctcgcggtgctcgggcccgctcagcgcggcacgctcgcacagcacctgccaccggtccgcgcgctggtcgacaccggcgctttcaaaatggcgccagcggctgtggtacggcacctgcaggtcaggatagcgctggcggatggtgctggcgacatagtcggcaatggcatgcacgcggtccggatgccaggtgaaaagttcggacgcgccgctggccacgttctcggtgaccgccgcgcaatgcgtgcgcaccgcctcggcacacagcagcgccgaagcgggatgcccttccggtaccgggctcagccagccggcaccaggccgcatctcgttacctgtgccctggcggtccatgccgggcttgccatcctcgggaaacatcgtcattcgttcaaccccctgccctttgccagggccagttcgttcgcatccggcggcgtgtagtgcgtaaagtagcccgcggccaccttggcatcgatctcgacacgggcgtcggcgggaatcagggtctcggggatggccacctgctcgaccacctcgatgccctgcgccaccagcgcgccatgcttcatgttgctcatcgacgcccagcggtcgatgcggcggatgcccagccagtggaacacatccggcatcagctcctggaaacgcatgtcctgcacgcctgccacgcattcggtgcgggcaaagtaagtctcggcacggtcgccgcccacctgccgcttgcgggcgttgtagaccaggaacttggtcacctcgcccagcgcgcggccctccttgcggttgtagaccaccagcccgacaccgccctgctgcgccatctcgatgcacacctcgatgccatgtgccagatacggccggcaggtacagatgtctgacccgaatacatccgatccgttgcattcatcgtgcacgcggcaggccacgcgggtttcaggcttgcccagctggctcacgtcgccgaagaaatacagcgtcatgccgccgatgggcggcaggaacaccttcaggtccggccgcgtcaccagttccgggaacatgccgccggtctgctcgaacaggctgcggcgcagcacgctttccttgatgccgaaacgggccgccagcccgggcagataccagaccggatcgaccgcagccttggtcacgcgcacatcgccattggcatggaggatgtcgccgtcgggcttgagccggccggccgcgatggccgacatcagctccggcatgttgatatgcgcgcgggtgacggcgatggtcgggcggatatccacgccggccgcgatgcggtcggcaaacacggtggacaccaggtggccccacggatccagcgaaactatcttctccgggtcgccccactgcggatgcgggccgatcgcctccgccggcgcggtatcggtcaggtcggtgcgatggtcgcgctgcaatgcgcccgcggcaaccgccagggcccggtagatggcgtaggcacctgcgtgagtgccgatcacattgcgctgcgccggattcgccaggctggcgatgaccggcccgcgctcggccgccgtgggggcgccccagtggataggctcggccggcttgtcgcggcgtgcgtgcgaggtcaggacgatatggtcggacatggcaccctcggttcccgatggaatcctgaccaaatggtcaggtttacgattccatactaggcaacctttgtgccatcgcccaatgccatttacgcgagtgttgctccgatgtgtgtggcgccgaacgcaagtttgcgcgggcggcatgcacgcatggcgtgcaggcgacgtggcataacgggtgcacaagcaccaacaagaagcgcgcacggccatgctggcacgtcgccgtccgggagaaaccgtaccaccgctgcacggccatgcctgcaaacgttacacgctttgccggctggcgcggtcgcggccgttgcccagcagcgcacgcagcgccgccaacggccgggcgctttcgatgtagcgatagaacaacgcgccggccacattgctgagcgcccatgcggcaaccatgccgagcgcgttcagcaccggctggcccggcgccaggttcgacaccagcgcgttgaccagcaggcagaccggaaagtgaaccaggaacaccgaataggaaatgcgcccgaagaagccgatcacgcgcgcccgcggccagcgctccagccagccgccgcggcgcgccaccgccagcagcagcgcagtcgccagcgccaccgcgatgcgcagccggaaatcgaaggccagcgccgccaacgttaccgcgccgaggaccagcagcggcaacaccgggcgaccggggttggacgcccagtaggccagcgcccccatgccataggcgccgaagaagtacagcgcccagatatcccacgcggcatcgcggttgaaccagaacagcgatgccaccgccaccagcaccacaatgccaatgctgaccccggcacccgccggcgctttcccgcgcgccacggcgcgcgcggcccacagcgcacccagcagcagcgcaaacagctgcaggtcgatggccacgtaccagaccccggccgagagcgcgtcgacatcgagcacgttatgcagcagcgtcacgtgcgcaaggaactgcagcaggccgggcggcgcagggatcgaatcatgcaccatccattggcgcgccagggcggccccggcaatgctgagcagcagcgccgcagcaaagggcaccaccagcttctggtagcgccgccacagcaccagcagcggatgctggctgatttccagctggccatgcggcgccaggctgcgcgcggcgaggaaaccgctgaccaccagaaagacctgcacggcgatgcgggcgtagtcgtagagccagtccaccagccccggggccagccgatacgcggtatcggacatcgggccatagaaggccaggtgatggagcacgatcaactgggagctgaccgctttcagggcgtcaatgcacggcaggcgcgacggacgggggctcattgttataggaatgttgcgattggcacggaaggcgcgattctacctgcttgcatccgctcaaatgtggcatatgcaccactacatatagattcgttacatactgccccggcttgttgcgagtttgcaggcacatggcttcatgtcttagccagcaggcattggcttatgaaaatgctgcgcaaaacagtcaggggccaacaggagccggcataaggaagtgcatacacaggcggcagctctttccacgaagcaaggcttgtgagtcaggcacgtgcctttatgcgtcgcggcccagaatatacaactgtcgggtggatacggggatgtcaggcttgaaccacacattccaggagagctctgttgtgcgccagtagcataagctagaggcaggattgccacctggggtccgcttatgcagcaccgcacgctcttcccccgcaccggtcacgccttccgttgcggcttggctgagtgctccctcatcgcccttctggccgcggccctggcgggatgcgagggagtcccccgggataccgcggcgacaccgccaccgccgcgtcagccgattgcgcccagcgacgacgtgtaccccgccccgaccacggtacgcgacacgcgacctgcggtgcgcactccgtaggcggcgttttcctacgcggccggcatccggcctttgcacccggatgtcattcccctgtcatccacgccaaacaaaatgccatccaggcagggtgcaggcgcccgtccgccagccgccttctgcggcagtgcagcgacggaatgtcttgacgccccgttttttccaccttcaatgaaaacgttttcatccggagctctaagcgtgaatcgcaaagatccagcggggggcaggcccgacacgacaggtggcgccaccctgatcgacgtggcgcaagccgcgcgggtgtcgctcgccaccgcatcgcgcgtgttcagcagcccgcacctggtgcgcgacagcacggcgcagcgcgtgcgcgaggcggcgcgccggctcagctttcgccccaacctgctcggcagcaagctgcgcgcccagcagacccgcatgatcggtgtgatggtgccaacgctggaaaacgcggtgttcgccgaatgctggcacggcatcgaggaagcggcgctggcgggcggctattcgctgatgctggtcaccagcggctacgatccggctcgcgaatgcgagcgtgtggagtacctgctgcgccatcgcgtggacggcatggtgctgaccgtggccgacgcggcgcacagcacggtgctggatcaactcgacggcgagggcgtgccatacgtgctggcgtacaaccaggccggaccgcgcagccggcgtcattcggtatcggtggacaaccggcgcagcgcctgcgccggcgtggaggccctgattgccgccgggcaccgccgcatcgtcgtggtatcgggcgccttcgtcgcctcggaccgcgcgcgccagcgctttgccggctatcaggacgccatgcgcgcgcacgggctaaggcccgccgcgccagtctgcctgccatcgcacaccgccagcaatgccgaacagatccgcgcgctggtccgggcaaacgatgcgcccaccgcctttttctgcaccaatgacctgctggccatcggcgtgatctccgacctcaggcgcctcggcctgagcgtgccgcgcgacatctccgtgctgggctatgacggtatcgcgctgggcagcgtggtcgaaccgccgctggccaccgtcgtgcaacccaattcggagatcggcgccagcgccgtcggccggctgcttgcctggctgcacgatggcggacgagcctcggcggcgccgccgcgcgtcacgctgctgccgcacgcactgcgcgtcaacggcaccgtggccgctccgccatcaatgtaaccgcgcgtaaccgcgtgcgcatgttgcatcccccacccctgtcctcaaccaaggagcctctcatgcaacctattccttcctggcgccgcccgctgcgctggattgccctggcgctaagcgccgccgcgttcagccagggcgtggccgcccagaccgcgatctgctacaactgcccgcccgaatgggccgactgggcggcacagatccgcgccatcaaggaaaagaccggcgttgccgtgccgctggacaacaagaactccggccagtcgctggcgcagctggtcgccgagaaggccagcccggtggccgatgtggtctactacggcgtgaccttcggcatccaggccaagaaggacggcgtcaccgccgcctacaagcccgcccactggaacgacattcccgacggcctgaaggacccgcagggcaactggttcgccatccattccggcacgctgggcttcatggtcaatgtcgacgcgctgcgcggcaagccggtgccgcagtcatgggccgacctgctcaagcccgagtacaagggcctggtcggctatctcgaccccgccagcgccttcgtcggctacgtgggcgcagtggccgtcaaccaggccatgggcggcacgctcgacaacttcggcccggccttcaagtatttcaaggacctgcagaagaaccagccgatcgtgcccaagcagaccgcatatgcgcgcgtgctgtccggtgaaatccctatcctgctcgattacgacttcaacgcctatcgcgcccgctacaaggaccacgccaacgttgccttcgtgatccccaaagagggctcggtggtggttccctacgtgatgagcctggtcaacaaggcgccgcatgaggccgaaggccgcaaggtgctcgactacgtgctgtccgacgccggccaggcgctgtgggccaacgcctacctgcgcccggtgcgcgccggcgtggtgcctaaggaagtacaggcgcgtttcctgccggccaccgaatacgcacgggccaaggcggtggacttcggcaagatggccgacgtgcaaaaggcgttcagcgagcagtatctgaaggaggtgcgctgacaagcgcgctgacgactggcgatggtgtctcccgcctgatggctgtcttcccgcaagcggggagacagccgggcggctcacccaagccatcgcccaccgcccatcaccccgtcactgccatgacaaaccgatccccctccctcttcctgtttgccttgccggcactggtggtcttcctggccttcttctgcctgccgatggcgcggctcgtggcggtcagcatcaacggcgagcaaggcgcgggcgtgtactggaccgtggtctccagtccgcgctacctgcacagcctgatggtcaccgtgctgctgtcggcagccgtgacactggtcacgctggtgattgccggcattgccggcaccttcctgcagcgcaacgcggtgcctggcaagtccgtgctggtggccatgctgacctttccgctggcgtttcccggcgtggtgatcggcttcatggtcatcatgctcggcggccgcaacggcctgctggccatggtcggcgacaagctcgccggcgagcgctggacctttgcctacggcctggccgggctgttcgtcggctacctgtacttttcgatcccgcgcgtgatcctgaccgtgatggcggcagtggagaagctcgacgcctcgctggaagaagctgcccgctcgctgggcgccgggccctggcgcgtggtgcgcgacgtgatgctgcccgcgatgatgccggccatgatctccagcggcgcgatctgctttgccaccagcatgggcgcgttcggtaccgccttcacgctggccacgcaactcgacgtgctgccgctcaccatctacaacgagttcaccaactacgccaacttcggcatggccgctgcgctgtccatcctgttgggcaccgtcacctgggccttgctggcgctcgcgcgctggttttccggcgacgccgtggccgcgaccgcctaggagccatcccatgaccccaacccatcgccgccccggctactggctgcaactggcgctcacactggcggtctgcgccttcatgaccgtgccggtcgtgctctccgtgctggctggcctgaccaacaatatcttcatcggcctggaaagcggcctgaccacgcgctggctcgcggaagtctggtcgctctatcgcaataccatcttcctgtcgctgctgatcgcgctggcctgccttgcctgcacgctggtgctgggcgtgccggccgcgtactacatggcgctgcggcgcaaccgcatcacccggctgatcgaggaactgctgatgctgccggtggccgttccgggcctcgcgaccgcgcttggcctgatcctgctctacggcacctggcaggcgctgcgcacgagctggctgtttatcctgatcggccatgtgctgttcaccctgccctttatggtgcgttcggtgctggccatcctttccgccatcgatatccgcacgctggaggacgcagcggccagccttggcgcgagccgcctgcagcgcttccttaccgtggtgctgcccaattgccgccagggcatcctggccggcgcgctcatggtggtcacgctgtcggtgggcgaattcaacctcacctggatgctgcacacgcccaccacccagacgttgccggtgggcctggccgacagctatgcctcgatgcggctggagatcggctcggcctacaccatcgtcttcttcgtcatgatcattccgctgctggtgctgatgcaagcgctcagcgcgctgggcgcgcgttcccgcaagtatgttcccgaagcggtgcccgcccctgctgttgccgccacgccggccaaccctcataccgagacccgtcatgcatgaacccaccaccatcaggctgcgcgattgcggcaagacgtttgccgacggcacgctggcgctgcagccgctggatctcgacatcggcgccgcggaaaccgtggtactgctaggcccgtccggctgcggcaagaccaccacgctgcgcatcatcgccgggctggagtatcccgatgcaggcggcgaagtctggttcggcgatacctgcgtgaccgcgctgccgatcgagcagcgcggcgtgggcatggtgttccagagctacgcgctgttccccaatatgaccgtctccgagaacatcggctacgggctgcgcgtgcggcgcgtggacgccgccatgcgccgcacgcgggttgccgacatgctcgcgatgatgcatctcgaacccttcgccgaccgccgcgtggaccagctctcgggcggccagcgccagcgcgtggcgctcgcacgcgccattgccgtgcagccgcgcgtgctactgctggacgagccgctgaccgcgctcgacgccaagctgcgcgacgccctgcgcgccgacatcaaccagttgctgcgcaacctgggcatcaccgccgtctatgtcacgcatgaccaggccgaggccatggcgctgggcgaccgcatcatcgttatggacaagggccgcatcgcccagacgggcacgccgcaggatatctaccgcgcgccggccaatgccttcgtggcggatttcatcggcaccatgaaccgcctgtccgccgctgccgagaacggcgcctggcgcgtgcctggcggcgtcgtgccccggacgcacgaatccgcgccggcgcagcgcgccgacctgatgttccgccccgaagacgtggcgctggtgcacacggacgacgcccatctgcacggtagcgtggtcacggccctgttcctgggcaactgcacccgcctgctggtggaagtcggcgcctccgcgccgctcatcgtcgacaccacgcgccgcgacaactggcacgccggagaccgcgtcggcctgcgcatcgacaccggccacctcatcacacttcccgaagccctggcagcatgaacaccgccccctacctggtcgcccacatcaccgacctccacatcaaggccggcggcaagctgtcgtaccggctggttgacaccgccggtgcactgcaccgctgcatcgacaccctgctggcagccccgcaacagcccgacgcagtgattgtcaccggcgacctggtcgacttcggcgccgaaagcgaataccagttcctgcgccagatcctgcagcggctatccatgcccgtgcggttgctgccggggaatcacgacagccgcggcgcgctacgccgcgtctttgccgatcacgactatctgttcgccaccggcagcggcgaagacccggtgcactacagcatcgactcgggaccgctgcggctggtggccttcgactgcaccgtgccgggccagcccggcgggcgcgtcgatcccggcgcgctgccatggctggaagccgcactgtctgccgacccggcccgccccaccctgctgttgctgcaccatccgccgttctttaccggcatcggccacatggacgagcagggcctggccaacgccgacgcgctcgaagccatcgtgcgccgccacccgcaagtggaacgcgtgctgtgcggccatctgcatcggcacatcacgcgccgcttcggtggcacggtcgcgatcaccgcgcccgggccggcgcaccaggtggcgctggacctggacccgcaggcgccctcgtgctttcgcatggagccgcccggctacctgctgcactggtggcatccggcacacggacttgtgacgcatgcggcagcgatcggggactatggggcagcgcatccgttctttgacgcgcagggcaagctgatcgactagcggtgacgctctggcaagttgttcgtaagcgccaggtgatggccttgcaagagtacgaatggcgaagccatgcctcgcaaccgcttgcgtcatgtcccagcttgcaggtggggtcatccgcgatgattccaccgcggagactcctcaccgaggtggtctgctgctttgcagatccgctattgccaaacggagaatcaacgacgcatgatcgccacgatcgaatcgacgcgggttctgtcacaggccattgcgattgcaatgcgatttgactacacccctgtcgatcgggactcggttgcctgaccgcagggttgcgtcatatcggggcatgcccaagtcatggcgcatattcccgcgcctggacaacggagcaggcccagaccaaccgccccgttgccctgccctgctcaggacaagcattccccgctgtcgcgcgcatcgctgcgcgcgccgtcggtgaagccatcgcgcgagctgatgcgggcgccatcggtgtaagggtcaggcttgcgcatgccgtccaggtacggatcaaagccacggaccgcgcacacggacctgccctgatacgcgaccacgggcagcatggtggcctcggtgggcggactgtgcgcgccatcggtaaaggcgtcgcgctggtcgctgtgtcccggcgcggcgacgatcagcccatcggcataggcaccggcgtgggcggtctggctgagcccggcggcaagtgcggcagcggcaagcagggtcttggcaagagtcttatgcattgctatctccaacaggggtgtcggcggcgttgccgcgacggcactcctcgtgcaggcgaccagctacggaacggtacaggccgcacgggatcgcctctgccgtgcaagccgttgcctggcgtgtaccggctgccatccgtggcagcggtgtcgcgccgggcttctggataaggggtacctgcgccccatgtcgaaagcgtggtgcgtcaggcgggcctgatgttctgattcacgcggaacaggttggccgggtcgtatttgcgcttgatctccgccagccgcgcatagttgtcgcgataggacgccttcacgttgtcattgccctcgtccatcatcatgttgatgtagccgccgccagcagagtgcggatgcagggccagccagtagtccttcgcccactgcacgatgcgatcgttgttggccgggtcgggatccacgccgacaatcacgctggcaaagttggcatcgcggtagctgaaggccgtgtcgtcgcagccggcgcgatgcgctgcaccattgatcggatacaggtgcatggtcgagtgcatcgacggcaattgctgcccgtacttgatgtgcagatcgatggccttgtcgctcaggtcgctgacgaagtccgctttccagtaccactgcaagcccgccggatacagtccgtcgaacaggctctgcaggacaggccaggggactggtccggcaaagtccaccgctggcggcatggcctcgcgaatcggacggaagtgcgtttcggcctgatcgatcgggccggtgtagcaccacaccactgcgcacatcttctgcaggtgaacttcctccgggaagggcgctgcgggaggcaccgtgacgaaaccgaaccagccattgatgtgctgcggcgcgctcaggatgaagtcgcgccaccatttcatcagctcgcgggcctgctccatcggccacagcatcgggccgccatagaccgtggctacgggatgagccttgaactcgaacgacgtcaccacgccgaagttgccaccgccgccgcgcaacgcccagaacaggtccgcgttttcgtcctcgcttgctgtgacgatgcgcccgtcggccagaacgacctcggcgctgagcagattgtcgatcgtcaggccgtaggcgcggctgaggtagccgatgccgccgccgagcgtcagtccgcccacgccggtggtcgagatgaagccactcggcgtcgccagcccgtaggcactggcggcgtgatccacatcgccccaggtgcagccaccgccaacccgcagtgtcttgcttccggcattgacaaacacgcccttcatgggcgacaggtcgatcaccagtccaccatcgcatgtgccgagcccggcgccattgtgcgcgccgccacgcacggccagcagcatcccgccgtcgcgcgcggcgttcaccgccgcgatgacgtccgcaacatcgacgcagcgcgcgatgatcgcaggtcgcttgtcgatcattccgttgtagacggcacgcgcctggtcgtaagccgcgtcgcccggctgaatcagttgtccccgaaaatgcgccttgagtgcggttgcgacgggttcgctcaatgaagcttccatggttgcctcctgtccggttggtatgcaggagttttagcaacctcggcgttttgaaagcgttaggtgaaccgttacaaggggattctgcctcccgaccggggcgcggtggtcgagccgaagctaacgcgcgagtaacgcccgcgccttgacgatgtcgggctgatcgaagccctcggtgaatcgcgcaagcggcgcctcgaccacctcatgcgcattgacgcgcccctgcgaggttcgcagcgttgtcaatgacagggtggcacgtagttcaagcggtagcgcgtgctgggctgtggcgatctcgatcgccttgatcagcgatgactcggcttcggcgaggctggcgctgctgcatagcagcaattcaccgcgcagacggtacagctcggcgtccacccagtgctcgccagtgcgcccggcgcattcgagcgcctggtccaaagccgccaacgcagcctcggtctctcctacgtcgcccaggcattcagccagcatggccagatacagcggcagacgcaggcgtgcgcccgttacgtgaaagccctcgatcgccgcctgcatcgccaccacggcgtcggcgccgggcgcctgtttcgcgttcgcccaggcgagcagtatgcctgcccaggcaaggtagtagcctacgtggtactgttcggcgatctcgtgtgccaggcgggcatagtgcagcgtgagaccgtgctcatgtcgcagcgcatgctgcgtcgcgagatatgacagcgcgagcgcctgggagaacgggtgtgctacccggtttgccacctccagcgcttcgcgtccacgctgaagggcctgatcggcaagccccctgaaccacaatgcgtgcgccgaccacgcggcggccagcacgccgaagttaccgcccatcagggacgcatgctcggcgtgctgggcctcgtcataagcgcggtgcgcgcgttgatacgcgggctcggcagccatccagtcgccttgctggaccagactacccatgacgctggtccatgccatcaccgagtaagtaccggagcccagcggccccaatcccgcaatcagttcctcgctcaggctacgtgcctgtgcaagttccgccctcactaccaggaaaaatgaaaggctgacctgggcgcgtgcttgctgactggcgtcacccgccagccggctcagttccaccgcgcgtcgcagcggcgcctccagttcgggtgccgcccagcctcgggcgatgcgaatcggtggcgcaaggtcgagttgcagggccagcgattgactggcgcgctcctgcggatcggcaatccggtccgcttgcaccagcccgcgcgtcagcaatgcaatggcatcgtcataggcatacacactctgcgcgacaacggccgcgcgccgatagaacgccgccgcctgggctggcaggcccgcccgctcatagtgcgaggcgatctgcgcgcttgccgcgtcgggcgcatcgcctgacgcctgctcgagcgctcgcgccacgcgcaaatgcaggcggcggcgctgtagcggactcacgtcggcgtatgccacgtcgcggatcttgtcatggctgaagtcaaaggccaggccgcgagcgtcggtctggcgcacgatgcgccgctgccacagctcgtccagtgcgcctgccagggcatcctcgccgaggtcgcttgcctgggcgaggatgtcggtcgtgaacgcccgtccaatgattgcagcaaccccgacgatttcgcgggcgcccggaggaagctgtgccagccggttcgagatgatggagtaaaccttgggcggcaacttcgacgccatgccgccctgtgcgtccccgaccggcatggtgtcggagcgggcccgcatcatttcgacggcaaacagcgggttaccctcgctctcttcgaacagccgggttgcctccgtgtcggccagcggccggtccaggatctgggccgctatctttgccgtttccgcggcgtcgagtgtccccaatgagatctcgatgaactggtcgtcgcggcgtagtgcgtccagcagccggttcgccgcgtgcagcggcatgatttcctcggggcgcgccgttgcgaccaccatcagccttgccgccacgtcgaaacgcatcaggaagcgcagccattcgagcgtctcgccgtcgcaccattgcaggtcgtcgagcagcaacagaagcggcccgccttgtgcaagcaccgctcgcgcaagcgcctcgaagaaccgttggcgttgccagtattcggtaagaggcgacggcggcgacagtccggattgctgcgtgaggagttcgggcaacaggcgcgtgacctcggtcagccacagtctgtcgagcttgccgatcgcaccactcaggccagggctgcgcagccagccggtcaccggcgcaaacgcaagctgtccctcggccgcataggcgcgcgaatgcgccacggtgatgccttgctcggccagatggaccagcagttcctccgccaggcgcgatttgccgatgccggcttcgcccaggatcaggacaaactgcttgtcgcccagctgggtacgctgccagacttcaagcagccggcgccattcgccatgccggccaatcattggcagcatcgcatcccgccgcgggcgttggcgctgcattgacgcagcctgcgcagccaaccgcgcataggcctcgcgcatggggtcgccgggcaggacgcccaattcgcgagcgagcgtttccacacagctacgataggcgcgcatggccgatgcgtgatcgtggttcagcgcgtgcaggcgcatcagcgccaggcaggtgggttcgcggcacgggtcgagccgctgcaactgctgtgtgtacttcaacgcctttgcatagtcgcgccggtcctcactcagttgaccgaggcgcgcgagcgccgcgatgcactgttcgcgcaacttttcgcgctcggggtggatccactcgtcatagcagttggccagcaggtcaccgcgatagagatccgcggcatgcgtcagcagttcttcttcagcgcctgcgtcgccgtgcctcgaggccctggccgcagccgcaagcgcggactggaactgcgctacatcgaggtcaagcggcgaatcgggcagccatcgcaccgtttgcgcatcggcatggacaaactgatctgcctccggccaggtcttgcgcagctgaaacagcagttgacgcagggcattgcgcgcctgcgcctgcgaggaatcaggccagaacagtacggcgagctgctgccgcgtctgcggtgcgtcgcgatgcaggacaaggcaggcgagcagcgcctgcaagcggggggagtttgcgttaaacaggggcgcgccagcgccgtcgagctggaactcgccaaacaaacggacggaggagcgggcctgcgaagtcatgctggagcgcaatgcggcacaaagcgatggggagctcctgtaggcagcgtgcggtgcgcgctgcgctagcgctcgtgcgggaactctccaacacccaagcccgcgcgagcgccttccgtgactatactcgcgttggcgcgtcccatccggccaacgtcgacgagcagtcactccctttcccgccaggtcctagccgaagacctcggatgcgtccgtcatcagtctaagcccatgggctcggattcgctcctgggcacgccgagcaaagactgatgcatccaggtttgacccgagcttccgtacgccgtgggagactcgccgaaaaatgaaatcaacttcgttttcggtgaagtcgccgtaggcaaggtatgccctcagcatctggttaaggtaggcatcacactcacttcgctgcaatactagtgcgcttgccagcagagaccgcgagtgccaccgcagccaccggcgtctccagtgcttgtagtcgtccttcaccaattgacccctccattgcccggcggcacctttctttacgctgcccgcaatcaccaacgagtagggagcacgcggcgcgctgtttgaaaatcatcatagcgtgacggaaatagcagggcaatcggctttcctctggagaaggtcccaccaaagagggggtatggcgagaatcttgcgattgagggaaatcgtgtggatcgccgagcgaagcggcgggcgggcactccgaccggccgctcccaattacccgggccgggcctcaagtcaaagattgaggcgctggaaatacccggtcagttcgaggtagccccgtccgaccaccttgcctccccgcaacgccgtcaccgcgccctcccaatagaccgcgccggtactcgcgcggctatcgagttcctgatcatccatcagcggtagcagttcgagcgtgagaccgcctgcgttcaaccgcatggcaaccggatagctcgtgccggtacgaggcgagcgccaacggcgtgccggcatgaagttgacctcgtcgggagccagtacctggacgcgaccgtcgctgccgcgcagcgtgccgcctccccagaacttgcgccccggcttgtcccggatctggaaggccatcaacgcgctgccgtcatccaggttgaggccgagccagtcccagccgacggcctcgtcggccagcaaggtcgacgaccattcgtgatccagccaggcggtaccgtgcacggtttcctgcaggctgcgccgttccagggtgccgctcaccttgagccccggctggctgtagtaatagctcgcctgggccgccagcggtcccttgcggctgtatccccgttcgccctgtagcagcaaccgttgggttggttccattgtcagatcgagcgtgaaatcccgcgcgggaaatctggctcggtagtgccccgtcgcctctcggcgcagcgaccagctgtcgatgtacacatcggtatcggcagtatcggcaagcgcaaggccgaagccgctgcgcgccgcgcgttggtcgtgctggagcttgccggccacgggatcgctcagtgcgacattggcgaacagcagttgctgcggcgcgaagcggcttgggttggcctggtcgaacggcgggcgcgagcggaagaacgtaacctggaagccgagcggcgctcctgcccgcgtctgcagccagccggtggcataccaccattcggtgcgatagtcggggtgcgcgccgtggtcgcgcgggaaggacagggttcgtcccgcggcgaccggcggataagcgggcgctgcgcccagcgccgcggccgccacgccggaacccggcaacaacagcaggaatgagcgcctcttcaccaatcctcctgaaccgcgcgcactgcgctacgcgacatcgcctgccgcccgctcgccagcgcagccagcgaggccgccgccaccaccgcgctcgccaactgggcgaggaatgcccagggcaaatgcaaactcatggtccagtggaacgactgcgggttgacaacgtgaaccaggatcagggcgatgatccatcccagcgcaagaccggctaccacgccaagcagagcgagtaacgcgccctccagtgccagcatcgcgccgatctgccaacgcatgaagccgagatgccgcagcatgccgaattcgcgcgcacgcgccagggcctgcgcgctgaagctggcgccgatgccgaacaggccgatcacgaccgctatgccctccagcaggtaggtcacggcgaagctccggtcgaagattctcaaggtgacggcgcgtatctcgccaggctcggcgaaggtaatgtgttcaccgccggcgacgcggtggcgcagcctctccttgacctgcgccgggccggtgccctgctccagccacagggcaacgtcagtgacacgccgctcgtccgtgagccgtcgataatcgttctggctgatcacgaccgtaccatgctggcgtgcgtaatcgcgccacacgccgcccaccaggaaggcgacgggccggccctgcagcggcagcgtgatacgttgccccgggcggaagccatagaggtcgaccatcgcctcgctgacccataccgccggcggatcccccggctgcgccgcgacgggcgctgccgtcagcggcaaccgtgcgcccggattgtgcggatcgatcggccgggcaatgaccgtgacgggggggcgctcgggatcaagcaggatctggctcgaacgtagaaactcggcacgcgcaacgccacggacgctggcgatggccgcctggtcgtcaagcgagaaatacgcgctgtcgccgcttgacgaagcacgcagataaaggtcggccggcaggacattgtgcaaccaatcgtccaccgagatgcgaaagcttgacaccatgatcgccatcgccgccatcaggctaaagctggcgactatgccggccagcgcgatggccgcgcggcccggtgcgccggcgagctgggtcagggcaagctgcggcacagcccgtcgccaagagggcagcaagccgaacacgagatgcgccagccgtggcatcagcaggatggcgcccaccaacaacagggcgatcgccgcataaccgaagaccggcagatccgccaccggccgcagtggcgtcagcacaagcccggctgccatcgcagcaagcccggtccacggcgagcgtagccgcttgagcggtgtctcctcatcgcccgccttgagcgcctgcgccggccgcgcgcgtgcggcctcccatgccggtgcgagactgccgagcaccgccgccgacaggccgagtgtgaagaagatcagcgctgccagcgcgtcgaaccggaccttgggctttacacctgcaaagtagccgccgcccaaatctccgcccgcgtacccgagcaccgtggcggcgaggaagaagccaagcgccaggccgagcatcgcgccgagcgcgccttgcaccgcgccttccgccagcagcagccgcagcagaccagcgcgcgtcaccccaagggcgcgcaacagtgcaagctgcgagcgccgccgcagcaccgagactgcctgcatcgtgaacaccaggaaggcgcctgtgaacagcgccaccagagcaagcacgttcaggttcacccgataggcgcgcgacaggttggaagtccggcgcgcgttgtcctgcggcgaacccgccaccacccctggcggcagcagcgcggccagcgcttgcgcaaagttgtcggtgtccactcccggcctgagcttgacgtcgatccgctgcagcaggccaagccggtcgaggcgccactgcgcggcaccgatatccatcacgcccaggcgcatgccctcgcccgccgccggcagcgtgccggcaatacgcagcgtaagcgcggtcagcccgacttgtacggtgagcgggtccccgggcttgagatcgagccagctcagcgccgccggcgacaggaacacggcgtcgggatcgagaacgtcgagcttgcccgcgcgctcctcggcgggccgcccgatcagattgggtgttacaggcgccgcccggaacacatcgatgccaaacagcgtcagcgcaccggtgcgccccggcaccagcgcattgacttccaccacggggctggccgacgccacctccggcaggcccgcgatgcgcggatagagcgattcgtcgaagcccatgcgcggcccgcggatctccagatcggcattccccatcaaggagcgcaccgcctgggaaaactctgccaacgcagcgtggttgaccagatgcacgccatagcccattgccacaccgatggccacggcaaggatgccgatgatggcgcgtccgggatgggcgcgcaattcgcccaggagtagtgcaaggccgagtgagcgcggcgttcgcatggcttaggcggccgcgctcatcggcggctgtggccccagcggcgtcaatccgcctggcgtcaattgcaagacgcgatccgccgtcgccgcagccactgccgaatgcgtgacgataatcgcggccgtgccgtttgcgttgaccagtttgcgcagcaggctcagcacccgcgcggccgtctcgtgatcaaggttgccagtcggctcatccgccagcagcagcattggacggtgtaccagggcacgcgcaatcgccacccgctgcaactccccgccggaaagctcgcgcggcagactgtcctcgcgcccctcaagcccaaccgcggcgagcatctcggcaacgcgcgccgacgcccctttttgctcgaggccgttcaacagcagcggcagcgccacgttctgcgccgcgctcaaattcggcagcacgtggaaggcctggaacacgaaccccagcttgcgacgcctgagcaaggttgcggcatcgtcgtccagcttgcccagatcctgtccgtcgaactggatgcggccactgtcgggccgatccagaccggcgatcaggtggagcagcgttgacttgcccacgcccgattcgcccatgacggcgacaaattcgccggcgtccagcgcaagactgactccgcggagaaccgtgcgcggtcgggcgccgttgtatgtcttggagacatctgtaagggtcagcacaatgtcgtcaacctcgcgtggcgtgcctctccgtcaaagctgtgacgggagagcgggcacaagccattctgccaccgttgaagtgcatggacttgtcgaagaaggccgctagaagtcggacgattcccactgggaacggtgcagccactttgccatttcctggcgctggttcgcttcgcagccgatcggggggatttcgactgacgcagtggcaggcccgttccattgatccgttcactggctatccttctgcttgtgcggctcgtgtagatgcggcacatttgtttccgtcactgtctgggcgcccatccagctccttgtggcgccgccgggggcggaaagctggcgcagtccatgcgcaagacggcatggatcatgcggccattagcgtgtggcgtctcggttcccgggtgagatccaggccggaaatacacccgctgcgcccatggatggctcagggaatgaacccggcagcttcatcaaccgtgcttcaggtcaccgccggaaccacagcatcgagagcccgcacgccacccccagcagcaggaccgctgctgccgagaacaatgcgctgatctcggtttccttgcgctcgagcgcgaagcgcgcgctgagctggcgatacacctggctcaggtccgcagccgagccagcctggaagtactcgccgttcgttatcgccgctaccgcccgcaaggcgggttcatcgagctgcatgtagtaagacaggcccgactctgccgcggctccgccctgcggcgtaccgaagcccaccgtatagacgcgcacgccgcgctgggcggccatgcgcgcagcgtccagcgggtccgggccggtggtgcggcggccatcgctgagcaggattaccgcaccgtgccgatacgagccgggctgcgccgccggccgttcctgttcgcgcttgcggacggcgtccgccgcggcggcctctgtcagcgatctgccgccgggaccgggtgcgagcgactcgccgctgaaaaggatggcttccaggtcgatgccatcgtcggggaacaacactgccagcgcctggatcagcccgctgccggtcgccgtgccgagctggagctggaagcgatcgattgcgtcgagcatgtcctgccggttgtcggtggggggcagcaccacggtcgcggtggcggcaaaagagaccatgcccaggcgcacgctggccggcagcccgacgatgagatcccgggcagcctgcttggatgcgccgatccgggttggtgcaacgtcggtcgccgccatgctgcgggaggtgtccatggccagcaccagggtgatggtgtcggacggcagcgtgatcgtcgccgtaggacgggcgcaagccagcagggccacgcccagcgcgagcaggaagagcagtggcggaatgtgacgccgcagccgttggccgggacccagggcggcgcgcggcagcgcaaggctggcatacaacagcgcgattttcttgcgccgcgcaatcaggtacaggtaagcggctgccagcaggggcagcgcaagcaacagccagagcatttgcggccagagaaactgcatgcacctgctccttggcgcgtgggtaagacgatggtactgtatttttcacggcgggacgggacctcgggagcggcaatgagacgggtaacgatctacggatgggtctcggcagcggtggcgctggtgctcgcggcggtcgttggctctgcctggctgttgcagccgacgccgcgcgtcctcaagcaagccgacatcgactccgccgtgctgcacacgctggaaaccaagcgcctgccttcgcgcacagccagggcggcagaggcggttcgcgagtcggtggtggaagttcgcagctatgcgccagccgaaaaggctgcggacaagccgaagaaagcggcatccgccccacacgccaagcgtgatccccctgccacacgccgcaaggcaccccccgaatcggctccgctatccccgccgccttcgggcgatgaactcgcaaaaggcgacccaccgggcagcaagggcgagtccggcggcaagcgcacagcccgccacatcggttcgggggtggtcgtgaccgaaagcggcaccattctcaccagctaccacgtcgtcgccgacgccctgcgcctggaggtcaggttccacgacggccacacggccgaggcctcggttgtgcaggcgttcccggagaaagacctagccgtgatccggcccagttccatccccgacgacctgccgccggcgacgctcggttccagccggaacctcgcgcccggcactgaagtcgtcgcggtcggctttccgttcggcatcggcccgtcggtgtctgccggcgtggtgtcggggctcgaccgcaggttcgtcttgccggacggcaagcgggacctggacaagctcatccagttcgacgccgccgccaatccgggcaactccggcggaccgctggtgaatctggatggcgaggtggtagggatcgtcaccgccatcctcaaccccaaccagagcggcactttcctcggcatcggctttgctgtcacgatcgaaagcgccggcgcttccatcggatcctctcctttctaatcgcgggggcctatgaacgaccaaacccggggcgcagtggacagcgccgaattgatggaacgcctgctgtatgaggtgaagcgcgtggtggtggggcaggaccacttcctcgaacgggtgctggtggcgatccttgcgggtggccacctgctggtggaaggcgtgccgggcctggccaagacgctgaccgtcaagacgctggccaggaccatgagcggctccttcaagcgcatccagttcacgcctgacctgctgccggccgacctgattggcacgcgcatgtataaccagggcacgggcgagttctccaccgtgcggggcccggtcttcgccaacctgctgctggccgacgagatcaaccgcgcgccggccaaggtgcagagcgccttgctggaagtgatggaggagaagcaggtcaccatcgccggcgagtcccatctggtgcccacgcccttcctcgtcatggccacgcagaacccgatagaaacggaaggcacctaccccttgcctgaggcgcaggtcgaccgtttcctgatgaaggtcctggtgggctatcccagcgaggaggaggaggccgtcatcgtcaaccgtgtcaccggccccagcatcagcgtgagccccatcgcgacgccggagcgcctgacaagcctgcaggacgaatgcggcaggatctatgtggatccgagcctgctccagtatgcagtgcgcgtggtggcggccacccgcaagcctggaggctacgggctggaggacctggatcgatacatagcgttcggtgccagcccccgcgccaccatcggcctgatcgaaggcgcgcgcgccctggcgttcctgcgccgccggcactatgcgctgcccgaagacgtggtcgatctcgtgccggatgtcttgcgccaccgcctggtgctctcgtacgaggccatgtccgacggcgtgactgccgaccagctcgtcacccgcatcctgcaggcgctgccggtcccggagcgcccattggaatcccatgttcgggcgcctgcgcaataggcggcgccggagcggcccggaggccgcacccggcagcatgcccgccggcacggcgctggccagcgtcgacgcaaggcagaccgaggccttgctgcgccgcctggaatggaccgtggtgcgccgcctcgatggcctgctgcagggcgactaccgcacgctgttccgcggctttgggctggatcttgccgacctgcgcgaataccgccccggcgacgacgtgcggcacatcgactggaacgtgacagcacggctgcaaacaccgcacgtgcgtgagtaccaggaagaccgggaggtctccgtctggttcctgctggacctgagcggatcggtcggtttcggttccggcagcgtaagcaagcgtgacctgctgagcgacttcaccaccgtcatggcgctgctgctgacgcgctatggcaaccgggtcggcgccctgctctacggcggggccacagacgcgggcgcgtcggtggtgccggcgcgctcggggcgccggcacctgctgcacctgctcgaccgcatgcatggcacaccggccgcgtcgccgggcgacacccgcttgcgcgacctgctggagcgcgcacgggcagtcgcgaaacatcgatcggtgctgttcgtggtctccgacttcatcagcgccccgggctggcaggcatcgctccaaatgctggcccggcgccatgaggtcgtcgccgtgcggctggtcgacccgctggagatggccttgcccgacctgggcctggtcgtgctgcaggatgccgaaaccgccgagcagatgttcgtcgacacgcacgacccggccttccgcaaacgcttcgccgccgccgcccaggcgcgcgaggacgaattgcgcctggccttcacccaggccggcgtggcgtgcctgacgctgtcgacctacgcccgcctggacctggccctgctgcacttcacccgccggcgccgccaccgtcaaggtgccgccgcaacagcaaagcaggagaacggacccaaggaggcagcatgaccgatgccataagccggctacccgtcttcagcttcctgtggccaggcatgctgtggctgctcgcgctcgccctcgtgctgtccgctggctacgtatggctcgacaggcgccggcgccacgccacggtgcactatcccaccctgaaatccgtcggcgttgccatcaggggcggtgcgaccttgcgccgccacgtgccgcccatgctgctcctgctggccctggccgcgctgaccttcgccatcgcccgaccccaggcagtgatgatgctgccctcgcacatcgagaccgtggtcgtggtcatcgatctgtccggcagcatgcgcgcgcaggatatccagcccagccgcatccgcgccgcccagcaagcggccaaggttctactcgacacactgcccgcgggcgtcagcgcgggagtagtcgcgatggccggcaccgccgccgtggcacaggcgcccagccgcagcaaggatgccgcggccacggcgatcgaccgcctcaagccgcaaggcggcaccgcgctgggcaatggcctgctcatcgcgctgacgacgctgctgccgcagacggctggtgacgccgagcgcctcatgaacggcgacaccacgccgctgcaaaagccggacgcatcccacagcggcgaagccgtgacgcccggctcttatccctccggggcgatcgtcctgttttccgacggtgaaagcaacaccggcccggccgcgacgcaggcggcgcagcttgccgcggcgcacggcgtgcgcgtttataccgtcggggttggcacgaccgacggtgtggtgctctcggtcgatggctggtcggcacgcgtcaggctggatgagaaggtgttgaaggaagtcgccaatgcgacaggggcagagtatttcccgcttgcggatgccgcgcaactgaagagggtgtaccgggcgctcaatatgcggctgacgtttggcaagcgcgaacaggttgaaattactgcgttcttcgccgcgctgggggcgttgctggccacgtgtgcggggctgctgtcgttgtggtggttcgggcgcgtgatgtaggcagggactggctctggcggaggaaagccggccgtccctttgccgcagccgtgccccacactcagaaccactcagtcaccgccccctgcccacaacgaagttcaaacagcttcttcggagatcggatgctcggaccgaggatcggaatccatgcgcgcattctaggtggctcatcagcgtttccgcggcagacttcgtcattgcccccgattttgcggtctctaacaacggctaattgccgcgccttccccggtctgctggtttagtgtcgcgccaccgcgtcggcgtcatcccgaactgcgcagtgaaccaacggaaaaacgagccataagcggagtacccgagcgactcggcaatgcgtcccagcgagaggcttccgttgtccatgtagtggatgacgagatcgcgccttacgccattgaccatgtcggagaagacctctccggcgctttcgagctggcgttgcagcgtgcgcacgtttattcccaggccttgagcaacttgctcgatggtagcgcgccctatcggaagcatcaggtagatcgccttgcgcacctcgagtacaaccgacggctcgttagcccccggcaacccttcaagcaagcgttgggcatggcgtgccatgacggggtcggcaatagggttgggaatctccaggtcggcagctcggcaaaccagaccgttgaacgagcttgcgaactccagcttccccccgaagatgcggcggtgcagccgcagatcagatggggcgtcatgggtgaaattgacgctaagagggtaccaggaagtgcccagaagcgtgctgcacatgcgtgacagtgtgcccagtgccagttcaactgactgtatggacgggccgacatcatccgcgacgacgtcctcccgcacgatgaccttcttgccgacctcctcgatccggatgaccaggagctcattcatcaggtgccgaaactgaatcaacgttccgacagcgtcgcgcagggtcctttggtgcgtgagcaaaacgctgacgacaccgagatcggacagttgccacaaatcggccatacgcagcccgaatgtcggacattgcgtgatccgcgctgactcttccagcaaggtaacggcaccactcccgggaatccaatggtccgggtccgcaagcatctcgctgctcaaccgcaatttccttaacaacggctgcggttccagacccaagtgctgcgcaaccttgaaatagttctttagcacgccagtgcgaatcaatgtgcccatcttctctcattcacccggggagtaacccggatccgttcgttcaggggaaacccgggcacccagcattctgtcacgaaaggagacatcaatgtcatgaaatgagagaaaacgaccgccccgggattaatagactaatcccgtaaatcaacgatgaacggaaccccctggcagcgtccggttcgacctcaacaattcgttgcggcgccgatagctaaatcccctatcacggagaacgaaatgcaatttctggatgattcgctgcacccggagaatatggacaaggtggtgatcacggtggccccctacggtccggagtggatgccggaagatttccccgaagacatcccggtgaccatggaagcgcaaatccagaaggccgtggattgctatgaggccggcgccagcgtgctacacctgcacgtgcgcgagccggatggcaagggttccaagcgcttgtccatgttcaacgaactgatcgccggcgttcgcaaggcggtgccggacatgatcattcaggtcggcggctcgatctcgtttgcgccggaagacgatggccaggctgcaaagtggctgtcggacgacacccgacacgcactggccgaactcgacccgaaaccggaccaggtgacggtagcgctcaacaccatccagatgaacatcatggagttgatctatccggaattctacgaaggcacgtccctcgccaatccggctacgtacgatgcctatcgtgaaatgatcgttccggcaggcccgacctgggcggaagaacacttgcgccgcctgcagaatgccggcatccagccgcattttcagttggttggcatgcatgcgctcgaaacgctggaccgcatggtgcgcaagggggtctacaagggcccgctgaacctgacctgcatcggcatcggtggcggccaccatggtccgcatccgtacaacctgttcgacttcatccagcgtgcaccggatggctgcaccgttaccgccgagtcgttgttcaagaacgtactcccgtggaacacgatggcgttggcgatggggatgcatgtgcgctgcggcatcgaggacactctcattgatcagcatggcaagcgcttcacctcggtgcagcaggttcagcagcttgtgcgaatcgccaaggagttgggccgcgagatcgccgatggcaaggaagcgcgggagatctaccgtattggcacctggtacgacgatgtcgacgaaaccctggccggcaatggcatgacccctaaccgcaagcctggtgtcaagaacgtgccgctgcgccgcgtagcctgagtcgactacggcgcagacaacaaatcggtccagttgatgtgtgcaccccagcgcctgaattgcagcaactggatcgatctgtcttgtcttgttcgctcctgccggcgtcagtcatgaggagcaagtcttagcgcccctgctcatgtcagacgcaccggtcattcgcacagccaccgcgtacgacgcggtaacaacacataggcaaagagccaaatgatctcgaacatcatccgactcacacgcggtacctgccttgcaacgctgttgtccgccctgcccctgtccggcgcgctggcggaaggggattggcccaaccgccccattcgcatcctcgtcccagctccggcgggaggcgcatccgacatgatcgcgcgcacgattgcggaaagcatgcgccagaacctcaaacaatccgtggtggttgagaacaagcccggcgcaggcggcatcattgccacggaggcaatgctcgccgcgccacgcgatggctacacattcgtgctgtctcccaactcgcttgtgacggagaacccgtacagctacaaattccgcttcgatccgttcaaggatctggcaccggtcgctgaagtggccagcgtgccgctggtgctggtcgccgacccgcgtctgccggtcaccaatgtcagcgagatggtggcctacgtgaaggcacatccggggaaggtctcctatgcgtcctacagcccgggtacgctttctcacatcaaaggcatgcagttcaacaaggcggccgggctggacatggagcacgtcggctacaaaggctcgccccccgcgctcaccgacctgatgggcggccagattcagttcatgtttgacggcatgggcaccgcgcttgcgctcgtgaaacccggcaaggtccgggcgctggcggtgacatcggccgagcgttcgccgttcctgcccgctgtgccgacaatggcggaagcgggctacccaaatctcagccagatcatgggcaccagcgtctggtccacgcccgacgtgccagctgccatccgcagcaagctgcagcaggagctaatcaaggccgtctcatccccttcggtgaagagccagcttgcggcacttggaatgaacgcagggagtcccacacagacctccgccgatctggagaaaacgctcaagcgggagaacgagcggacaggtcaggcactgcgtgccatcaactacaagccctccttgaactgaccgccatgcacgacgacaagtacacgggtacaagcaccccgccagccacacccatcagcgacagcttgcgcgcgagcggctattggaatccggagtggaacagctttacggagctggaccccatctggaccgagaaattcctcgacatggccatgcatccgatgaccaaggggctgatcgagccaaaggtctgggagttcatctccattgccgtcgatgtatcctgcacgcacatgtacggtcctggaacgcggcgccatatccgccgcgcgctcgagctgggcgccaccaaggaagagatcgccgccgtccttcaaggcgttagcgttctaggcttgcacgcgaacagcatgggtgcgccgatgctgctcgaagaagtcgcgcgctttgacgcgcattctcaaagcaagaagtgaatctcttccatccaaggcacaccatgccagtcagcttcatgctctgactggcattttgacccattcaagcgctttccatggctttcctgctccagtcaccccctagcgccaacaatagcgcaatgcgctggttgagatgatcgcccctcaggtggatcagatccatctcggcagccagcattgtctgccgagccttcaggacgccgcgcggatcggaagcaccaatgctaacgcgcgcctcctcgcgctgtaccaatagctggctctcgttcacccgatcctgcagttgcctggtgcgatctgcaagattcgattcagcgcgcaaccccgcatcgacctcgcccagtgcctgcagggcactgttgccataggcgatcatggcggccctctgctcggcgctgtagtagtccgccctggccttgagctttcctcccgtgaacaacggcgcgaagatcgcgccattcagtcccttgatcggagtgccggactggttgagcaacagcacgtcgctacggatgccggtaatggccgcgctgattgaaatgcttggcagccgcgctgcctcggcggactgcctcaggtcgaaggccgcggcgacgcggtgcgccgcggccgtcaagtccgggcggcgatcaagcaggtctgcaggcaagcctgcctgcggggctatgggaatggcgggcaactccagcttccccacactattcccgatttccccggcaggatagcggccaagcagcagttccagggcttgcgcggcctggctcctggcgagttcggccttccgcagcgaatccacctgcgtgcgcagcgcatttttcgcctccgccggttcagtatccggcgccgcaccgatggcaacccgccgctcggcgatctgcaccagttgctcctgcacggcaacggcttgccgctgccggtcttccagctttgcggaccggatcagcgtgaaccatgctttggcagtagcggctgcgacgacgcgctgcgcccagagatattcgtccgcggtagcggcatactgggatttcgcggcacacgattgtgcgcggatgcggccccagagatcgatctcccagctcgcaccaatcgaaaggaactgggtttccgaatggccagccctgcccttcacgcccgcgctcggcaacaggccgctgctttgcatggtaacgagtgcctgcgcctgctcgacgcgcaccgctgcaagcctgagatcgccgttgtgcgcgatcgcttcccgggccagccgctgcagctcagcatcgtcgaagcttgcaagccagtcgtccgcgggctcgcctgctgcggcctcgtttgcccaggtgcgctgcccttcaagcgcggggaccgcctggcctcgaaggctggcgctatccggcggcgcctgcagagcgcagccaaagagcatggcgagcggcaccagcagtaccggaagagtcttgttgagagatgacgacacaggcttgcctttaatggagcttgaataccagatagttcagcttggaactgacgcgcaggaagaccatccgaacgatatggaacatcttcatgtgcgcggtgtagatggcacccgcgccgaccgccccgaccggaagcatctggcccttcgattcgtcgcgcaggtccagcttgacggcgaaccggttcggtacggcttccgtggcagcagtgttcggaatcattcccccctgcgcgaactggccttgtgattgcgcccagacgatcgaatccacccttgccttgatgatttcacccggatgcgtcggcaggtagatctcggcgacatcccccgccttgacgttgtatagctcgttctgcttgtagaaggcgaccacctcctgctcgtcctcaacgaagctgaatgccggcgagaacggaaacgggaccagcatcgtgcccacgcgcacctgcaggttcacgaccttgccgtcggcgggcgcccggtactcggtttggccaagttcccatcgggcgttctcgagcatgacttcggtttccgcgcgcttggcgcgcgccgtggcgatggcggcgaattccccctggcttttggcagacagcttctgcctggcctcgtcctcgacggcttgagcgctggccagttcgccttccagttcgtgccgccgcgccagggcatcttcccggtcaaacttcgatccggcccctgccgcaagcagtgcctcatgttccctgagccgctgtcgggcgagcgacagcttggcctgtaccgtggcaaccttgccggccgctccgcgcacggactcgctgagttggcgagcaacggcctgcgcttcggcaagcgcggcgtcgtccgccatcaacctgccctcaagttgcctgaccgaggcctgatagggcgtcgggtcgatgcgcagcaggacatcgcctttcttgtagtgccggttaccctcggccggaagttcgacaatgcgcccccttacctgcggcaccacctggagcaccttgccgaccaccctgacatcatgggacgaaggtgccaccacgttcagcgtcaggaccagcagcgtcagggcaaccaccggaatcgtgaccacgatgaccatggacgtcgtgttccatggcagccatttgaacttgaagaagatcagccagacggccagcgcgtagatagcaagcagcagcgcatccattcagctctgctcccctgcgccggacgtagcgccgcgtgccggcgcccgcagggacgcgacgttcccgggccggccgatgggggcatgtgccgcgcctcgcgccgcttcgtcttccggtagtttgtcggtgccataggccgcccggtagaacaccggcttggtgtgtgcccagagccaggccatcggccacagcagtccgccgaagaagagcgaaagcaggcatagcgcatggatggcttccctttgcggatgctgcttccggtgggcgaccttatccggccagatatgcagcatccagaacaggtagatggctgcgagcggcacgaatatcatcaccacccaggagatggcattggcggcgctctcgagggcctttccgctgaggaaggaggcgaacgctggttcatgcattgccagcaggccaaggcccgccagcagatattgacgcagtttcatcggggaaatagagagatagggcaccagggcccggtgtttgacttgccaggtactcggtcgcgttgagaactacagtgtgctggccggcgcagtacccgctgattcgctgcggctgttcctggcggcgctatccggcatgcgccccgcttgccggccggattgtgcatccgtcgggcagttccggcacgggctggctgaaaccggcccggttgacctttcgctgttgccggccggcacatcgtccgcgtacaggaggttgtacttgctctggccggcattgctggccgcacggcaggccgcggattgcaggccggcgccggtaccggagcaggcttccggctgcgccgcggtgtctcgctgctcgtgagcgggcaggttctgcgcgtacgattgcgcggcgccggcaatcagcagggccatgacaaggtttggcaccccacgaccgcgcgcgccggcgcccgctatcgagacagccgaaaggcagtgcttgatcattcctgtagtttccttcgaagtggatcagataccgtcgacgcaaaccggcgcggccggtcgcttctccgtggatgtgcacaccttatgccggtggcgcgggcggggctatcaaagaaattcgaaagtgaggttgcgtcgaatcgatgcgcgccaagggccgcccggtatttcgaattcctttgatagccaccatggcgaggcaggcttactctgtccgccgtcgtatgccctcccaggtgaagatcaggttcacctgaactgactatccaatgaatgctgtttccgcgatttccacacgtgtcatcgccattgccacggcaagcgccatctcaggatgcgcgatccctacctctgagacctggcatccgttccaggagccctggccgtggacgaaaatcgtcactgtcaaccggaccgatcatgacgtgctggcactacgcgccggcccttgcgagaccggacccgcgtcgtggcgctcgctgtcggcaccctccttctgcttccttggcaccaagccggaggggcccatcgcgataacctggagcgatgccatagccggcacggaatcccatgccgcatccgaacagggcgaactgcttgcctcgacggcacccctgccacgcctttggcgggaaaagcctcatgcgggcgaagccatcggcaacttcctctgcgtggtcctacgcaatgatgcgcgggtggacgttgccgttaccgccagcgcagaagcttgcgccgttctttaggacgcctctgacaagttgctcggcgaggtagaccggctgccgccagcccggtccacattccgcggtgccgccgtgcacacggcaagagcaagacttctacgactgctcatgaactctcctgagaaggtgccagtccggggcatggcgctatcattccccggtggcggggattcgcgcctcggtgcggcggcaatcagcgccagccaatgcgcccggccggggcacagagaaaaatacccgccgtacaggcgggcgaaccaaggccctcgcaacggggcagtacccaagacgagtggtgccttaagcaggcatccagccttccccccaatgctgaccgtgcgtaggtgtgttcacaatcatagaagttagaaggccagcggacgagaaccgcaggcgacctcgttctcaccacgcccgcgctcgcatacgctcatcaggccttgagcgatgaaggcggactgcagttcgatctcatcgtcccagcgtttggcttcagccacgtggccgtgcaggtcagcgcagagttcggacagtcctgagcgccccacgaccccgagcgtccccgcgattcgatgcagcagccgttccaggtggcggatgtctcgcgctgcccggaccgcctcgaattcgttcaggtccaccatggtctgcgccaggaacgcttcggcgtattcttcggcgaccgacggcagctcaggcagatcgtcatcggttagcagcactggcgccgccccatcatccgtacgtggcgggtcggccttggcggcaacagcatcgagcaccgaagccagcgtcgccagcgacaccggtttcgtgagatagccggtaaatccgcttgccagcccctcggtaacatccttcggtctcgcgcttgcgcttacggcatagacaggtatctccggccagcaccgcctgatttcacgaagcaggtcgaatccattcattacgggcatgtccacatccgtcagcactgcatgcacgccctgttccgacaacactgccagggcctcgttgccgttgcctgcttcgataacgctcgcacctaacaggtgaagctggtcgcgcagcagtttcctgttcagcagattgtcttccgcgaccaacacggaaaggcccgcgaacggcgctgcggactgatcgtgtatggcagccacgacacgatcttcgtcgacaagcctggtctccggagcattattgaggaccgcctgtgcagcggcatggataccggccaggctgtaggcagacacctcccggctgccatccggccgtatggtcgggacgagcgggcccagttgcttgagccatacgatagtggcggggttccgccaccacgccatgacttgggccggatccaaggactcggtcacgagcaggcagtcgaacctgtccccgtcaatgggctcgtcgatgctggaacgaaaaaatggctgtgatgatccccagtcgaaatggttcagcattccttcgaggcactctggctcacgggacaggaccagcgcgcggcgcggcgccaggcgccattgcgccggggtctgatgcccgcccggcgggctgagcggcaggcgaaccgtgacgcgcgtgccaacgcctagtacgctgtccagcgtgatacgtccgttcatccgctccaccagccgcatgcagattgacagtccaagcccggtcccgccggcctgcgcgagacgattgttgccgatctgggagaatggctgaaacagccgttccttatactcctccggtatgccaacgccggtatcggtgatgacgatctcaaggttttcatccacccattgcgcgcgcaggacaatcttccccgcctcggtgaatttgaacgcgttaccaagcaggttgttgatgatctgtgtcaggcgcaccgggtcaagattgagccgcgccggaatctccttgccatacaccgcgaagaagctcagcccacgccgcgccgcaagcggcgcgtgcgagattgcaatgcgacccaggagttccgtgacgacgacaggctcctccgcaagacgcatcgctcccacgtcgagcttcgaaaaatcgagcacgtcattgacgatctgcagcaacccttcggccgacacctgcatggagcttacccgcgcccgctgctccggctccagcctaccgagggccacgagctccatgtttcccagcagcgaggaaagcggcgtccgtatctcgtggctcatcgaagcaaagaacgccaccttggccttggccgcagcctcgctggcaagtctcgcttcgtgcaacagctgctgtgcgcgtgccgcttcggcatatgtgccggtcaggaagcgatagttccagtatcgatacatcgcgaatagcaaggcgagaagcgcggccgtaatcaggccggtaacgagcagttcctcccgcatttcccggaactgctgccctagcggcagtgcgaagaccaggtggccgaaatccgcaatgagcggcgggcgccgcagggcccatccatagtcctggacccaatgaaacagcccctccggaagtccctccagcctggcgtccaggcgccgtgcgttggcccgtgcacctgaagcaaccagtggcgtgcccaggcgatcgacgacaattggctccgggatcgacaaggtcggccaggctggccgaagcaagtcttgcagcgggatccgcgtcaacacgatggcgtagagtgcgtcgcctttcgcgaccagcgatgcgccaaccatctccggactccctccggctgcattcgccgggatgcccagccatacgacacgcttctcccgcgctgcctgcaagagatccatgtcgcggctctggaaccgctcaagaatcatcgtggtgatgcttgacgacgacagcggcggaagggtcgcagccacgccgaatcccgatgcgtcgggcgcttcataccgatacgtcgccccgttcgcaatcgagatcatttcgatcgaaggcttctggcttgcggcagtcagcgtccggacagcctggtcgcaactctgctccaacaccggatcgggaggcgcagacggagacacctgtgtgcatagactgccggcatgcccgcgctgcgccacggggactttgccattgctgcgcaactcaaggatcaggttcgtcgccgtcagggtgctgcggcgttcgagcaccgcatcgacgacgccctgctcgtacaggcgcgcgacctgctcctgggcgcgcagggattcattcaggcgggcaagcatggctgccgaagcgatcgcgatggcgaccagccccagcagcaggaccaccatcgagaacacacggcgctcccgctgcagattccgctcaaccgagtgatcggcgtgtagtggcgattgctgcgagcgctcgcgctcttcctgcatcaggtaagaccgttgtcgcgtgcgtacgtgacaaggtccgcattagtggtgatattcagcttgcgcattgccgagcgcttctgcgtcgcaatggtagcgagcgatcgatggagatatcccgcgatttccgtgagagtgctgccagtcgcgaacatccgcacaacttcgatctcccgcggggacagcgggcttgccgtgccgttgaccaacgcccccgcacttgacatcctggccgctatgcccggtgacaggcgctggccagtacctgttattgcatcgacacagatttgcctcaggatgcccggctcctcgttcttcccgacgatggccgcaacgcccatctccttgatgcgcgtgagcagtccgccattggtcaacatcgtgaaaaccacgatcggtgtatgtggacgcgactgcctgagccggtggaccagccgaagaccgtcatcattgacgtgggaacgctccatcgtgaaatcggtgacgataaggtcaggttgttgcgtttgtagcgccgcaaagagctcttttcctgacgagcatattgcggaaatccggacattcgggatctcgctcaaggtggccttgactgcgagttgaattaccgggtgatcgtctgcgatgacgacggagatgacaggtggcggcatgcgcgttaactcagaccggcagcacgcttgtatggatcggggcgacgtgcccaaccggcggaactggctgcatagggcaccggattctaccaaggggcactcaccttcatttgacaaaatgggacatatatttggctgatcgtcccacgcggagtaatcgtactgcgtcccagtccaaagctcttccaggcgcgattcctgtctaaccgagcacgcgaggagctagcgcaaagggcacgcgttcatatagatcacgtcaagcggaagacatcacagcaagaggcttgcacctggcactactctcgctgccctaaagcgcaagcgtcaccacgcgcagcgtggcatcgtctggacacgctaaatcggcaaatccaaaacgtttagccagtcgccgcatggcggtattcgacgacaaaacatagccttccatgcatcgatagccgcggctccgagcgatgtcgatcagtgtgcccagcagtcggctggccaggccgagtcgatgccagtcatcggcgacagtcaccgcaaactcgcaggtatcgctacccggcgcggcggcgtagcgtgcgccacccacaatagacgacaccttgttttccgtggcaagcgctaccagcgcaaactcgcgctcagccgacggatgcgtcgcttgctcgagcatcgcttccggcagctgttgcatggcagccatgaatctggcgtaacgcgcatcggcagaaagtctgttaaatgccgctaacaggccgaccttgtcgtcttcggtaatctcccgcaccagcacttcccgtccgtcgcacaggggcacgttgtacgggacgaagtttgtcacgtcagacttggcttgcatggcaacggagtcgtaaggaatgaaagcgagctcgttgaatcactcccccgcagcatttgataatagctgatccggcgcagttttcccgatatcgaacatagacgattacgcacgacatcgccgccatcgagccgtattgtcgcgccagtccgaccggaatcaatttgccccccggtctccgctacgagcgcctagaatgctgggtgagccaagactcacagaagctcgaatggaagtcgtttccgtgccaaaggtccaaacacacataatgaactgaggagagcgacatgaccgtgcgcaaattgccagcagttggtttcgcagtcctgatgggactgatttctataggcgcggccgcccagccggcacaaggatcccaacagggagcggcgccagccgaggtgccgaaagctcccccgactacggcccaggccaaggctctgattgccgagcgattcaaggctgccgattccaatcatgacggcaagctgactcgtgacgaagctcaggcgggaatgccaaaggtctacgaaagtttcgacaagatcgacgtaaaaaaacagggtcacgtcaccgagcgccagatcggttcctattggatgaagaagaccaaggatcagatgcagaaggaagatccgatctggaactgaaggagttgcagcaattccttgtactgctcatggaatgatggggcgggagaaatagagtcgtacctcttgccccttgagggccttgagagcgaggctgccagtcggggctcccaaacctcgatgccatggcaaggcatcatgcatcccctcttgaaccggctggatgagccttgtgccgtcaacccactttagtttcctcgtggaaccttggctggctgatacgttcacgcatagtggtcgcccgatgcccgacgactgagtgccggctagactccgagcgccgcccttttcctcccgcgatgtcaacgagcgctgcgtttcacgccatgatattgacgccgccatccacatacagcgtttcgcccgacagccgccgggcgtaaggcgtggccaggaaggcgcaggtgtatcccacatccataatatcgaccagctcgccaagtggagcgcgttccacagcgtcagcaagcatcaaatcgaagctcttaagcccggacgcagcgcgggtctgcagcggcccgggcgagatcgcatgcacgcgaatgccgcgcgggcccaactcgtacgccaggtagcgtgatacggcttccagggcggctttcaccgggcccatgacgttgtagttcggcaccaccttgttggcgccgtgatagctcatggtgaacatcgtgccaccatcgcccatcaggggcgctgccagccgggccatgcgcacgaaggagtggcaggacacatccatggccttggcgaagccttcggccgaacaattgagcaggccgccctgcagatcgtctttcggcgcccaggccaccgaatgcaccaggatatcgagctttccccactgctccccgatccgcgcaaacaactcgtccatttccttctggctcgtgacatccagggggaggaagatggaagcgtcaagctcctgcgccaccggctcgacaaactggcgcgccttttcgctggcataggtaatcgccacctcggcacccagttcgcggaaggccttggcgcacccgtaagcaatggagtgctcgttcgcaatcccgcagacgagtgcgcgggcgttggcgaggataggcagttgttgcgctgcagtcatgtcactctctcctggattcattgttgccagcgagcggtcgctaccatgccgctggcttggtcggctgtagcggtggtcatcgagcgggtgccgccaggacctcccgggtatgcctggcaatcatcagttcctcgttggtcgggatgacccagaccgggacattgcccgaggctaagctgatgcgcggtccgtcgctggcgttcgccgcgggatcgacactcacccccagccatgccgccagccggcatacgcgctcgcggatcggcgcggcatgctcgccgatgccagcggtgaagaccagcgcgtccagcccctgtgcggcggcggccagcgaaccaagctcccgggcgacgcggtacgtgtacagttcgacggcaaaacgggcctgcacatcgtcgctggcgagcagcgcgcgcatgtcgctcgacaggccggagacgccaagcagaccggattttcgatagatcaggtcctcgatggcgcgggcatccatgccgagttcgctgatcaggtagaggatgacgcccggatcgaggctgccgcagcgagttcccatcggcaggccatccaccgcagtgaagcccatcgtgctggccacgctgcgccccgccaccagcgcacacatgctgctgccgttgccgaggtgggccacgatcgtgcggcccgccgctgcacccgcatcaacgctcgggaggacactggcgatgtactcataggacagtccgtggaagccgtagcgcctgacgccgcgcgcgctgatctccgcgggcaatgcgaatgcctgtgccacttccggctgcgcccggtggaaggcggtgtcgaagcagactacttggggcagttccgggcgcctctcggcaaggatgcggatcggtttgaggttgtgtggctggtgcaggggtgcgagcgggcatagcgagtccaactctgccagtagcgcgtcggtcaccctttccggctgggtgaagcgtaccccgccgtgcaccacccggtgcccgaccgcgctcagcgtatgcccttccccatggccgcgcaggaagtccgccaggaaggcaatggcaccctcgtgcccgagcgtggtaccggcatcccaccgcctggtctcgacctcagcgcccaaggcgtcggtggcgtggaatgccggtgccgcgtagagaccttcgatgctcccgcgcagcaccagcctcagtgcatcgtcatgggtattgtaagcacagtacttgatgctcgacgaacccgcattcaggaccaggatcagttcggccatggcatcaccccgccacctggccggactcgcggcgtgccttggccaccagcgcggccaccgcgcacgacgccagccgggtcatgaccgagtcggcacggctggtcaggatgatgggcacgcgcgcgcccagcacgatgcctgcggcgtcggcgccggccaggaaggtcaggctcttggcgagcatgttgccggcgtccaggtcaggcaccagcaggacattggcgcgcccggccaccggtgagtcgatcttcttgatccgcgccgcgtccaggttgatcgcgttgtccagcgcaagcggtccgtcgacgatcgcgccggtgatctggtggcggtcgaccatcttgcacagcgcggcggcatccagtgtggacggaaccatcgggttgacggtctccatcgccgacaggatcgccacgcggacctccttgacctgcaaggcatgggccaggtcgatcgcgttttgcaggatgccggccttctcggcaagcgtcggggcaatattgacggcagcgtcggtgatgatcagagcgtcctcgtggccgggcacatccatcacgaagcagtggctgatgcgccggccggtgcgcaagccgctgttacccgcgaccacggctcccatcagctcatcggtgtgcagactgcccttcatcagagcctctgccttgctttcgcgcaccagttgcactgcggcagccgccgccgcatggctgtgctcggcatcgacaatcgggtactcgcggatgtcaatgccggccgcgcgcgcggcgtcctcgatgcgggaacgcggcccaaccaggatcggcgcgatcaggcccagccgggcggcctctacggcgccttccagcgaagactggtcgcacggatgcgccaccgcggtcggtgtaggcggcatggccttgcagtaatcaatcaggcgctggtacttctcatgcttggcgttcacgggctactcctgcgtcagggtcgtcggtgtcggtcggctgcgaggcctgtgccagccgcggcgcgctaggacgcgcgggtgagcggcgcggccgcgccgcggacgcgttccggcttggcgccgagcgccgtgcggatccgctccagcattgccgtctgctcgacagtgggcctggcgccaagcaggcgctcatcgacacgcagcttctccgccagcgcctgcagccgctggcggtcggcctgatacctgagcaaggccggcagcgtcgcgagcgcctgttcgggcgcgtaccgcgtgatcagctcctgcctgccgcggatctcgcgccaggcgtccggctcaagttccggcagcagatcggcgtagtccgtgaccagctccttgcgcagctccagcctggacagcggcaggggctcacccctgcggctcagcaggcaggccagccgggcaatggcctcggcgtatccgccttgcccgaccgcggccagcgccgctttgacttccggcaggtcatgcgggtcggtcgccgccggggtacccgcgcgggcggtaggctcgctccttggctggaacgggaacaggttggcgtacacgttgaaaaaggtgtattcggtcatcgcatcgcgcacggcccggtatgcgtccaaaccggcgctgagcatttccgcgcccacctgctcttgctgccgcagcggatgatccggttccaacgtttgccggctggcccggaccgcgtcggcggcgggcttcaaccatgccatccacggattcaggtccgagaacagccagttctgcatgcgtagcggatggaattcgcgcagcacccgtgctgtcatctcattggacaccgcctggacgtaaggctgcgcaaacagctcgtaggcgcgctgcgtgaagtccgacaggttggcgaccgtctcgaacggcttctcgtcggcgcgctcaaagcggttaagcctgctggcgatttcctcgagcgagtgctcctcgaactggacctcatagtccacgccatcgctacccttgcgctcatggatgaccatgccgtagagcccaggcggcagcagttcgatgctcttgagcaccgagacgatctgtgcgtgctccttctgcgcgaccttgccggagacgaagatgccgagatggccgacgctccggtgcatcatgccgacaatgacctggccgcgagccttgatctcctcggtactgccgtagatgtccaccacccagttgaatgcctgctgcggcggcgtgatgttgtcgcccatcgaggcaaacaaaacgatgggcgagcggatctcgcgcagatcgaacgccttgccgccggcgttcttgacttcaccaccccacagcttgttgccgacgaacaggttgcgcgtgatccattcgatctcctcgcggttcatcaggtagtagccaccccaccagcgttcgaactcaagaaagcgcggcggctcggtatcggccttcttgtacaggttgtagtacttgtcccagagactgttggacggattcaggttttcgaaattttgtaccaaccaggcgccgtcaaacttgccgttgccgagatccgccgtatacgacgccaaccacgtgccgcccaggagcccgccggaatagcgcatcgggttgtcgccttcgccctcgctccaggcaccgctccagtacgacatcggcgcgccgttgatcacgatcggcccggtgtcgcccgggtccgaggcgccgagcatcatcgcagcccagccgccttggcaattgccgatgatggctggcttggcgctgtgtggatgcagttcacgcactctcttgatgaactgttgctcggcctcgcacacgtccagcagggtctgtcccggctcgggatcgcggaagaagatgacaaaatacacaggatggccggcacgcattgccacgccgacctgcgagtcgtccttgaaaccgccgatgcccgggccatggccggcacgcggatcgatgatgacgtaagggcggcggctatcatcgatcgtcacgccatcgggcgggataattttcaacagcgcgtagttgacgggccgttcgaactggcgggcatccagaacggtctcgtagccaaaatgcaggaccggcttgagcccctgcatggtgttttcgacaaagttgttgccccgttgcctgagcgtgtcccagaacaggatggcacgctgcatgctgtcgatggcataggcatagctgctcatcggatccatgccggccatcgggttgatcgggccggcgcccggctccccaacggcttgctgcacgcggccactaaaggcctcctgcgcattcttcaggcgcttttgcagcaccatgccggtcttgaggccaacttcacgcgcgtgcaccagttgctttgctgcatccatgccgttctccgctgcgaatcttgtgacacggttggccaagcgtggtagcccagcccccgatgtgcatcttgcttcgaactatagcgtcgaccttggtcgcaatagaactgaatcttttcggacgatgagataagaaggatttctttccaggacggcaggatgaatgaccatatcctattggactctgcgtgcgctatgctgaactggcgcggcgcacacaccgcggacccgctggagaacgatcatgcgttatcgcctgcccgcctgcgtgactgtcacagtggcggcccttgtgctgggcgcctgtgccactctccggcccctggaaaccgcagagggcatgctcggcggcccgcagcatgccgtgcgcgatacgttcggcgctcccacggaaacctaccagctcgctgatggcaccactcggtggatttattcgaaacagccgctcggcttcgaagtctacgcggcagactttgacgccaacggcaagcttacgagctttcggcagatgctgaccgagaaagaaatctacgaggcacgcccgggggtctggaccaagcaggatattgccgagcgctttggccgtccgcgcgagcccatcgagtactacccgctgatgaagcgcgaggcctggtcttaccggctctatgcgggcgcctacatgccagcgcatttcagtgcctactttgacgaacgcggcgtgctcgaccggaccatgatcatcgtcgatgcgatcggcggcgacacgcgagacggcagcaagtaagtcggcctcaggccgcattggacaagaacaccacgataagggccggaaggagccggagtccatccgaagcaacgcgagtcgtcgtgcatccatcagatttcgcgtggaactgttcagcgaacagcaaagcacaacgaaatccgccgacggcagaacctcgtcgacggatcaggcgctgggtaccgtacgatcgattcgtatttttcgatcgatcccggtgttccgtccttctcgaccagccgcacggtactgccgagtccgagtcatagacgattgccagatggcccaggcaaggctttcggggcagggaatttgcttatgacaacaatgtccttcgcccgccctaaccaagggtataccctctcgtctttgcctttgccggccgctttccggtttcccccgcatgcctgccttcaccctgcccgccctgtccgcccgactcctccgcgcccgccgctcgctggccgccgtcgccctcgccgccatgtccgcggccgcgctgacgccggcactggccagcacccagagccctgtgctcgacaagatccgcgaatccggcaccatcgtgctcggttaccgcgagtcggcgctgccattctcgtttgccgatgacaagggccagccggccggctatgcggtcgacctttgcctgcgcgccgccgaagcagcacgccagcaactgggcctgaaagacctgaaggtgcgctggatgccgctcacgccgcagaaccgcattcccgccgtggtcaacgggctggtcgatctggactgcgcgcccaacaccaattcgcttgagcgccagaagcaggttgcgttcagcgtctcgcactatgtgtcgaccgtgcgcatgctggtgcgcgccgactccggcatccgctcgttcggcgacctgcgcggcaagaccgtggtcaccagcgccggatcgaccggcgaccgccacgtgcgccgcatgaaggcccagtacggctaccacgacgtctacgccaaggaccatggcgaatcgttcctgctgctcgaatccggccgtgcccaggccttcgtcatggacgatgtgctgctggctggcctgcgcgcccgcgccaaggacccgtcgcaatacgtgatcgtgggcccggcgctgtcggtggagcagaatgcgctgatgctgtccaaggccgatccggaatggaagcgcctggtcgaccaggcgctggccaacacctttgccggcccggaggtcacggcgctgcagaagcgctggttccagcagcccatcggcagccgcggcatcaacctggcgctggcgccgtccggcgaggtgcgcgcggcctggaagcacccgtcggacgcggtcacggagtaaacgggcaagcggtcgcgaacctcaatcgggctggggccgcaattcagggtttccatgaggtcgtggcgccggggcaagccccaagttgacagcgacgtgagatgttggcgacactgggccaagccgtcccgtgcaagggacaggccacatacacgaccgcccgacggcggcatttctcaggagaaaccatgaacaagttcgtcgcgaccgcgatcgcactctgccttggcgccgcttcgctggccgtgcaggcacagaccggcggcaagaagcagttcgatccgtattcccagggcgccaagtcgggtgagaagtttgacccgtacagccagggggccaaggccggcgacaagttcgacccgtacagccagggcgcgaacaagagcacccgcagcgacctgaccgacgcttccgcgccggccgccgagcaaaagccggccaagaagtccaccaagaagaagagcaagaagaaggccgcttcggcgccggctgccagctgagccgcaagcgcctgacgcaaaaaacccgccttggcgggtttttttgcttcctgccccagcgcacaagcctatggcgcttgcgtgtcgcgctccagcgcggtgacatccacgcgctgcaccttgtcatcctggcgcacttcggtgcgcagcacgaaggcgtcggcggggcaataccagtcggtgacatgcatcacggtcggctcaacctgtaccacttcttcgccaaccaggaccggccccagcgaggtgcgtttctcgtaggtgaccggcaggcattccttgcgccccaggacggtattgatcgtctgccgcttgccgacgtggcgcgagccgatatagatcgacgcatgctgcgcccgcatgttgctgaccacttcatccgatcccagcgggtagaccttcagcgagacgctcgactcaaaggtctcgccctccagcgtggtgccctcgcgcaggtccagcccggcgtagttgaacacgcccatgccgcggaaagccgcctcgccgtacatgcgcgcgtagcgcgcgcgggcgttgatgacggcatgctggctttcgatgctggtctggccgccgggcgaacggcggtcgatcaccacttcatgcacctgggtggtaatcaccggcggccccatcagcgccgacagggcagtcttggaattgatctccagttgcgcgcggcagccggtcggactgcgcaccacatcgcgcagggtcatgctgaccgacattggcatcacgccgtcgccttccatctgcacatgcgagccggagcggaaccatggggcactgcacagcacggccgccgccgctgcctgcgcctggcttgccgcagcctgcgccaccgccgcaccggcgcccggcagcgccgccgcaccctgggcgccggcatgctgcgccagcgccatggccacgcccgccaccaggcctgccagccggtcccgctgtgcctttttcttcacatgaatccccgtctagagtttccaggcgccccctgaccctgcgcccggcctgccaggcgaccgcctggacactgaaattatcgcgttttgttgcatgtgtaactcggatttttcgcgcagatcctgtggcagccggtggccggcgggcagcgggcagcagccggcctgagcagcactttctctcccccgcggcaatccggcgccccgcaggccgtctccagcacccgccgggggcggcctgcccaccgtgctaccattgcccgcctcgcgtgtgccgaggcggcagcggcgtgcgaggcgcatgccagcgtgccagccgcgggcgacttgcctccctggtgtccaccaacaggcaaggccatgcgttgtgatggcttcccgtcaccgcgcgccccacgcaggaccatcgatccgtcgcgcttttccaggagatctatgcgtagttcatcgacctcgcgggctgccgcgctgtccgttggagccaccaccgccagtgcggtcgcactggccagcctgtttatcctgctggtctggttcggcaccctcgacatgcgtcacctgctgcgctccgatgaaggccgctacgccgagattgcccgcgaaatgttcgctaccggcgactgggtcacgatccgctaccacgaactcaagtatttcgagaagccgcccttccacctgtgggtgaccacgctggcctacacgctgtttggcgtgggcgactggcaggcgcggttgtgcgtggccctgtccggcatcctggggctgggcgtgtcgatgctggccgcggcacgctggtacggccggcgcgtggcgatgctgacggggctggtgctggtttccgcgccgatgtggaatatcgccggccacttcaactcgctggacatgacgctggccggcgccatggcgtgcgtgctggccttcatgctgctggcgcagcacccggatgccacccgcgccgaacgccgcaactggatgctcgcctgctgggcggcgatgggcgtggcggtgctggtcaaggggctggtcgggctggcgctgccggggctggtgctggtggtctacacgctggtgacacgcgacttccgcttgtggtgccgcctgcatctgccgggcggcatcgtcgccatgctggtggtgacggtgccgtggttctggctggtgtcggaacgcaatccggaattcctgcatttcttctttatccacgagcactggcaacgctatacctcgaacgtgcaccagcgcgaaggcgcgatctggttcttcgtgccgctgctgctggccggcttcctgccctggctgggcctggttccgcaaatgtggaaggccgtgcgcgagcgcgccggcgtcgctcgcggcacctcgccgcggccattccagcccgccctgctggcggcgctgtgggccgtggcgatctttgtcttcttcagcctgtccggctccaagctgcccggctatatcgtgccgatcttcccggcgctggcgctgctggccggcgtggcgctggacacgttgacggaacgcgcgtggcgctggcaggtcaatgccatgattgccctgggcgtggtcgggctgctggcgtgcccgtttgtcggcatgatggacaagcccagcacgcccaatgtggtctatcgggaattcgcagcgtggaccggcgtcgccttcgcggtgatgctgggcggcgcactgctggcgcgccggctgctgcgcacgcgtggggtgtttcccagtgtggtggcctatgcgctggcgatgttcatctgctccacggtggcgctgcgcggtcacgaagccatgggccggcccagttccggcgcggacctggtgcccgccatcaatgccgtgctgacgccggacatgccgctgtacagtgtgggcatgctcgaccacacgctgccgttctacctgcgccgcaccaccatcatggtggcgcatcccgatgagctggaattcggcatcggccaggaaccgcagaagtggatcccgaccatcgatggctttatcgcgcgctggcaggacggcaagcgcgcggtagcgatcatgttgccctcgacctacgacgcactggctgcgcgcggcgtgccgatgcacaggatcgccggtgaccgccgccgtgtggcggtcgccaatttcgcgctgccgggcaatggcccgcagacgcaacccccaggacagtaacctgcaactcctgcaattcctgcactacgcagcgccatgacgctctccaccttcgctttcatcctgaccggcgtgctgctcaatgcggctgcgcaactgttgctcaaggccggcgtcaatgccatcggcgcgatcacgctggaccgtggcacgctgctggtgacggcgctgcgcgtgctgacccaatggccggtgctggccgggctgacgctgtacgtggtcagcgtgggggtatggatcgtggggctgtcgcgcgtggatgtgtcgatcgcctacccgatgctgtcgctcggctatgtggtcaatgcactggccgcctggtggctgttcggcgagatgatcggccccttgcgcgtggccggcatcctgctgatactggcgggcgtcttcctgatcgcccgctcatgacgcgcctgcgcgcacgccgccagttccgacaccgaccgtacttcctcgccctgccatgaccgcatccgcccctgagttcctgccttttgtccggcctgacatcgacgccgccgccattgccgaagtcagcaaggtgctggcctcgggctggatcacctccggcccgaagatgcaggccttcgaggccgcgctgtcaggcctgttcggcggacgcccggtgcgcaccttcgccaatggctcggccacgatggagatcgcgctgcgcattgccgatatcgggccgggcgatgaggtcatcaccacgccggtcacctgggtcgccaccgccaacgtggtgctggcagtaggcgcccggccggtgttcgtcgatatcgacccgcgcacgcgcaatctcgacctggatgccgtcgaggccgcgatcacgccgcgcacgcgcgccatcatgccggtgtacctgtcggggctgccggtggacatggaccgcctgtacgccattgccagcaagcacgggctgcgcgtgatcgaggatgccgcgcaggcaatcgactcgcgctggcgcggccagcgcatcggcgcccttggcgacctggtcagcttcagcttccaggccaacaagaacatcaccaccatcgaaggcggctgcctggtgatgaacacgcccgaagaagccgtgcgcgccgagcgcctgcggctgcagggcgtgatccgcaccggtatggacggcatggatgtcgaagagcccggcggcaagttcaacctgaccgacgtcaacgccgcggtcgggctggcgcagctgggcaagctcgacgccatcaccgcgcgccgcgccgagctggccgagacgtatttccgctgtgccgccgacagtggcctggaggcgctgggcatcgagctgccgcaagcgctggatgcacacgatgccaccaccaactggcacatgttccaggtggtgctgccgaccgagcgcctgcaaggcggcccggcccgggcgcgccagcaggtcatggaggccatgcgcgagcgcggcatcggcaccggcgtgcactacccgcccattcatctttttacctactaccgctcgctcggctggcgcgaaggcatgctgccgcatgccgaacgcatcgggcgcggcatcgtcacgctgccgctgttccccgcgatgcaagccaccgatgtggagcgggtctgtgcaatcctcagcgaaacatgcaaacgtctctccaaatgagcccggtcgaagtctcggtcgtcattccggtctacaacgaagaagacgggctgcaagccctgttcgaccgcctctatccggcgctggatggccttggcgagtcgtacgagatcatcttcatcaacgacggcagcgtcgaccgctcggcgcagctgctggcggcgcagttccacaagcgcccggatgtgacccgggtggtgctgttcgccggcaatttcggccagcatatggcgatcctggcgggcttcgagcagacccgcggcaagatcgtgatcacgctggacgccgacctgcagaacccgccggaagaaatcccgcgcctggtcgaagccatgcgcgccggccacgactacgtcggcaccatccgccgccagcgcaacgacaccgcgttccgccgctatgcctcgcgcgcgatgaaccggctgcgcgagcgcatcaccaagatccgcatgacggaccagggctgcatgctgcgcgcctatgaccgcaatgtggtcgacacgatcaatgcctgccgcgaggtcaataccttcatccccgcgctggcctacacctttgcttccaatccggtcgaaatcgaagtcggtcacgaacagcgccacgcaggcgaatccaagtattcgctgtaccagctgatccgcctgaacttcgacttggtgaccggcttttcgatcgtgccgctgcagtggttctcggcgatcggcacgatcctgtcgctgctctcgggcgtgctgttcgtggtgctgctggtgcggcgcttcgtgctcggctcggaagtccagggtgtgttcacgctgttcgcaatgaacttcttcctgatcggcatcctgctgttcggcgtgggcctgctgggcgagtacgtcggccgcatccaccaggaagtgcgcgaccgcccgcgctaccgcatcaaggccgtgctggaagcggaccggcgtgtcacgccggctgccgctggcgcggagcaatgatgcgcgccgtcgtcttcggctaccacaatgtcggcgaccgctgcctgcgcgtgctgcatgcgcgcggcgtggaggttgcgctggtgatcacgcaccgcgaccgccccgacgagaacatctggttccgccgcgtggccgacaccgccgccgagctgggcatccccttcgtctatggcgaggaccctgccgatcccgcgatcgcccaggccgtgcgcgacgcgcacccggacgtcatcttctcgttctactaccgcgccatgatcccggcgggcgtgctggcgctggcccccggcggcgccttcaacatgcacggctcgctgctgcccaagtaccgcggccgcgtgccggtgaactgggcggtactgcacggcgagaccgagaccggcgccacgctgcacgccatggaagccaagcctgacgcgggctatatcgtcgaccagaccgcggtgccgatcctgccggacgacactgcgggcgaagtcttcgagaaagtcaccgtcgccgccgaacagacgttgtggcgcgtcctgcccgcgatgatcgccgggcacacgccgcaacaccccaaccggctggccgagggcagctacttctccgggcgcaagccggaagacggccgcatcgactggagccgcccggccgccgaggtctacaacctcgtgcgcgccgtcgcgccgccctatcccggcgcctttaccgaccttgccgggcaccgcttcattgtggcgcaggcgcgccggccgctgccggagcttgcgctggcgctgcccgccggcacggcgcccggcctgcatgtgcatgacggccagatcatcggcctgtgcggcgacggcggcctggtcatggtcacccgattgctggcacaggatggctcggctctcacgccgcaagccttcgccaaacttatccataccgaatcatccaacgaggaaagccgatgaaaaaggtcctgattcttggcgtcaacggcttcatcggccatcacctgacgcgccgcatcctggaaaccacgccgtgggaggtctacggcatggacatgtcgtcggaccgtctcggcgacctcgtcgaccacccgcgcatgcacttcttcgagggtgacatcaccatcaacaaggagtggatcgagtacaacatccgcaagtgcgatgtggtgctgccgctggtggccatcgccaccccggccacctacgtgcgccagccgctgcgcgtgttcgagctggacttcgaggccaacctgccgatcgtgcgcgccgcggtcaagtacggcaagcacctggtattcccgtcgacctccgaggtctacggcatgtgcagcgatgaagagttcgaccccgaggcctcgccgctggtctacggcccgatcaacaagccgcgctggatctatgcctgctccaagcagctgatggaccgcgtgatccacgcctacggcatggagcaaggcctgaactacaccctgttccgtccgttcaactggattggcgcggggctggattcgatcttcgaatcgaaggaaggctcgtcgcgcgtggtgacgcagttcctcggccatatcgtgcgcggcgagccgatcaagctggtcgacggcggcgcccagcagcgcgcctttgccgatatcgccgacggcatcgacgcgctgatgcgcatcatcgagaatccaaacggcgtggccagcggcaagatctacaacatcggcaacccgggcaatatccactcggtgcgcgaactggccgagatgatgctgaagatggcggcggactatccggaatacgcggaggaagcgcgcaagacgcagatcatcgagacctcctcgggcgacttctacggcaagggctaccaggacgtgcagcatcgcgtgcccaggatcgacaacaccatcgaagagctgggctggaagcccgggatcagcatggaagcggcgctgcgccgcatcttcgaggcgtaccgcggcaaggtggtcgaggcccgcacgctggtcgattcggccaactgagcgcgcaacgcaaatggcacgcattgccctgaaggtcgacgtcgacacgctgcgcggcacgcgcgaaggcgtgccgaagctgctgtcgatgctggcggctgcgcaagcgcaggcaaccttcctgttcagcctcggccccgaccataccggctgggcgctgcggcgcgtattccggcccggcttcctgaagaaggtgtcgcgcacctcggtggtgtccaactatggcctgcgcacgctgatgtatggcgtgctgctgccggggccggacatcggccgcaagggcgccgccgagatgcgcgcggcgcgcgctgccggccatgagtgtggcatccacacctgggaccacgtctactggcaggacaacgtgcgcgagcgcgatgctgcctggacgcgccggcagatgcagcaggcgttcgcgcgctacaccgagatcttcggcgaagcgccggccacgcacggcgcagccggctggcagatgaacgaggatgcgttccgccagatcgatgactggggcatggcgtacgcgtcggatggacgcggcaccgcgccttatgttccgacgatcgacggcgtgccctgccggcacgtgcagatgccgaccacgctgcccacgctggatgaactgatcggcaccgacgacctgaccgaagacaacgtccacaccgcgctgctgaagctgaccgaaggcacgcgcgaccatgtcttcacgctgcataccgagctggaaggcggcaagctggcgccggtgttcgagcggctgctggccggatggcgtgcgcaggggcacgagctggtgtcgatggcgacgtggtatcgcgggctgaatcggcagggattgccggagttgccggtaacgtggggggagatcccggggcgcagcggggagttgatcgtgcagccgcagggctgaccgcgtgacttctcgtttgccggcaagcgctagccgcgccgctccgcccccacgcgcagcccgttgaacaccaccagcaggctcgcgcccatatcggcgaacaccgccatccacatcgtccccatccccagcaccgtcagcaccaggaacacggccttgatgccgagcgccagcgcgatgttctgcgtgaggatgcctgaggtgcggcgcgacaggcgcacaaaggccgggatcttgcgcaggtcatcgtccatcagcgccacgtcggcggtctcgattgcggtgtcggtgccggctgcgcccatggcgaagccgatatcggcacgcgccagcgccggcgcgtcgttgatgccgtcgcccaccatgccgatgcggccgccgcgcgcgtgggcggcgccggcaagcgccgcgatgccgtcggccttgtcctgcggcaactggttgccgcgcgcctcatcgatgccgacctgcgccgcaatggcttgcgccgtgtgtggattgtcgcccgacagcatcagcgtcctgacgcccagttcatgcagttcggcaatcgcctgccggctggtgtcgcgcacggtatccgccaccgcgaacagcgccagcgccgtggcggcgccgtggccgtcgacgcgcgccagcagcaccacggtcttgccctcgcgctcaagcgcttcgagccgcgcctccagcgccggcgagcaggcgcccatctcatgcaccaggcgatggttgcccaggcagtacgccacgccctgcaccttgccgcgcgtgccgcgccccgccagcgcctcgaagtcgtccaccggcagcgtgccgatcccgtcggccgcggccgccgtggccaccgcgcgcgaaaccgggtggtccgagcgcgccgccaggctggcggcaatggcgcgcgcctgcggcgcgtcctcggccagcagcgcatggttggtctgcgcgggcttgccgtgcgtgatcgtgccggtcttgtccagcgccacccaggccaggtgccggccctgctccaggtacaccccgcccttgaccaggatgccgcggcgcgcggccgcggccagcccgctgacgatggtcaccggcgtggagattaccagcgcgcaggggcaggcgatcaccagcagcaccagcgccttgtagatccagtcgacccaggcgccgcccatgaccagcggcggcaccaccgcaaccgccagcgcaagcgcgaacaccgtgggcgtgtagatgcgcgcgaactggtcgacaaagcgctgcgtgggcgcacggctgccctgcgcggcctcgaccgcgtggatgatgcgggccagcgtggaatcgctggcgggcgccgtcacggtgtactccagctcgccggactggttgatcgagccggcgaacagcgcatcgccctcggtcttgtcgaccggcacgctttcgccggtgatgggcgcctggtccagcgccgactggccgcgcacgaccttgccgtcgagcgcgacgcgctcgcctggccgcagccgcaccagcgcgcccacggcgacgccggcggcaggcacggtctcccagctgccatcggcacgctgcaccgtggcctgttccggcgccatcgccatcaagccgcggatcgcattgcgcgcccggtccagcgaggctgcctcgatgcgctcggccagcgcgaacagcaccatcaccatggccgcttccggccactggcgcaacagcagtgcgccggtgacggcaatgctcatcagcgcattgatgttcaggttgccattgcgcagcgcgatccagcccttgcggtaggtggtcagcccgcccagcgccaccgccgccagcgccagcacggcgggcagccacggcaagcccaggcccagccactccgcagcttcggcacccaaggcggccacgccggccagcgccagcggccaccagggcttgcttgccgtggtttgcggcaagacttgctgcgcggcctcggtgctcagcggcaccggctgcatgcccaggctctcgatcgccctggccaccggctccgccgacggcaaggtgtgatgcaccgtcagcacccgctggatcaggttgaactccagcgccgccacgccggccatgccgcccagcttgttgcggatcagcgtttcctcggtcgggcagtccatcgcgtcgatgcgccacgcagcggtctgcgcgccggcggggatgtcgaccggtgcggcgggcgtcagcgcaaccgtggacgagcagccgccgccgcagcaggcggaagccgccggtgcctgccgggcctcggcatggccatgcccatgatggtcatgatcgtggtcgtggtgatggtcgtgatcatgcccgccatgccggtgggcggcgccatcatgcgcgtgggcagcgtgatcttgagggagtgcgtcctcaggtgacgtgcgagccatatcttgttgttcccgctggtttagcctgatgacattgaagaccctgtagcgactacagagtcaagcggcatggcagcgactgcgcaccatgccgcagcggcacgtcagtgctcgcagttgaccatccaggacatgccgaagcggtccaccagcatgccgaagccttcggcccagaaggtcttctggtacggcaccaccacctggccgtcttcgctcaggccgtcgaagatgcgctggccctcgtccttgctgaccgcccccaccgacaggctgaagccgctgaacgccgggcgctccccgcgccggccgtcggacgccatcacctggttctcgccgaactggatattggcgtgcatcaccttgtccttccagtcatcgggaacctccatgccggggctaggcggggcatccttgtagcgcatcgcgaacgtgacctgcgcgcccagcaccttgccgtagaaggccacggcctcatcgaaacggccgccaaaatccagatagggttgcacctgcatatcgctctccttgtgaatggtcgatcgggctgcatggcattggctgttcgcccgcgcgccattatgcgcgcgtgccggtccggtgcaagcgcccagccggattcaggagaccgcggcgggggccggcgcgggcggcgcggcagtggccaatgcctcggcgggaaattgcagcgagaacatcgtttcgccttcaacgctgcgcaccgtcacgctgccgccatgcagccgcatgatggtgtcgacgatggccagccccagcccggtcgacgccgccgagttgcggcgcgacggatcggcccggtagaagcgcccgaagatatgcggcaaggtctcgggcgggatcgccggcccggcattggtcacgcggaggcaggccgtgccgctgaccggggccggggcgcgctccacgtcgagccgcaccgtgctgcccgccggcgcatggcgcagcgcattgtcgagcaggttggtgaccgcgcggcgcagcagcgtctggtcggcctgcaccattgccgtaccggtcaccgtcagcgcgacctcgcggtcggcggccacggcatcgaagtactcggccatcttgtccagttcttcgcgcgcgtccagcgtgcggatgcccagcgccacctgcgcatggtcggcgcgcgccaggaacagcatgttctcgatcatgcgcgccaggcgctcgtactcttccaggttggattcgagcagcgcctcatactcggccacgccgcggctctgcgccagcgtgacctgggtctggccgatcaggttgctgatcggcgtgcggaaatcatgcgccaggtccgccgagaactcggacagccgcgagaaactgtcctgcagccgcgccagcatgtcgttgagggccgccgccagctcgcgcagctcggccggcgcgctgcccacgtcaagccgcgtggcaaggcgactggtggtgaccgcggcggcatcggcggccatgcgccgcaacggccgcagcccgcgccgcgccagcacgaagcccaggcccgccgccacggcagcgccgcacagcgtggcccacagcacctggtggcggtagtcgcggatcagcgccacgcggtagccggcatcgcgcagcaccacgatctccacggccttgtccgaatcccccagctggcccaacgccgcaatgccgcgcgagggcacgccattcttggggtaccaggtctgcaacatgctcttctctggctgcgtggtggcgggcagcacgcgcagcggcggcaccgattcattgcgcggattgagcgtgaccagcggctcgccctggcgtgagcgcaccaccaggatcagcccctcgtggcccatcgcaatatcggcaaaacggtgggtatcggcgcgtatctcggcctcgctgcgcacctcgcgcagcaggtggcgcaccagcagcacctcgccgaccagctcgctttcatcgcgcccctccagctgcgccgacagcgccccggacaggtaggccgccacgctggcgagaatcaccgccgtggccagcccgtacgccagcgccagccgcgtggtaagcgaagacggcagccgcatcatgcgtcctggtcccggtcctcgctgtcgtccagcacgtagcccatgccgcgccgcgtgtggatcagcttatgcgggaagggatcgtcgaccttggcgcgcaggcgccggatcgagacatcgaccacattggtattgctgtcgaagttgacgtcccacacctgcgaggcgatcagcgagcgcgacagcacctcgccgcgccggcgcgcgagcaggtacagcagtgcgaactccttggaggtcaggtcgatcttctggccggcgcgcaccacgcggcggcggatggcgtcgatctgcaggtcggccacttcgatgaactcgctctcgcgcagcgggccgcgccgcaggatggtgcggatgcgcagcaccagctcggcaaaggcaaagggcttgaccatatagtcgtcggcgccgagctccagccccttgaggcggtcggacagctcgtcgcgcgcggtcaggaacagcaccggggtatcgcgctcgcggcgcagctcgcgcagcacctgccagccatccaggccgggcagcatcacgtccagcacgatcaggtcatagggatgctcgcgcgcatgggccaggccatccgcgccgtcgcgcgccaggtccaccacgaagccggattcggtcaggcccttgtgcaggtagtcgcccgccttgggttcgtcctcgacaatcaggatacgcatgattcgatcactttccgggcggcaccagcgccgccatggcgtaacgctagccgaggatgagcgccaatgggcaaagatttcacaaatgtcatcgccatgccagggcaatgcaggcgaaaaccccggtaaaatgcgcgatcatcaccggcgtcgtgccggtttgcgccaccctttcccccattctgcccgccccccgccgatgaaacgcctgccgaattgcctgctgctgtccctcgccatgcttgcgctgcccgtctccggcgctgcagcggcaacggccacggtatgcagcgcggtacaggcagccgggctgtcgctgccggaacggcatgcggccgcaaaaatggaggcggaagcggcactggacggcaccggcccgggcacctgccgcggcagcgcggtccaggtgatggccgagccttccggcagcggccatccgctgcagctgcacgatgccgatgcgccgcaggcgaccgaccacggcgccacgccgctggagacgcagccatcggccgcgtccggcgtgctgcgcgaactgcctgcggaggtgctggtgcattgggcgcacgcggcgccaatggccacgccggcggtgttcaccggcacccagccgctggaacgcctgctgcccgcacgctgctgagcgcgtcgtagcgggcacagcgcccgcatcgcttcccttccgttttgcggaatacccctggcgccggcaaggcgcggcggattgtcccgcctgcgcgtcttagcctgcgcgttttattcgacgcggaagaattcgatcgactgcccggcgttcacggcccgctgcagccagtccggatactcgccctgcccgtcccagctctggccgagcgcattgcggtatagcgggcgcgcagcggcagccttgggggcggcctgcgggataagctgggccacggctggcggggcgtcaggcgccggctcaggcccggcgtcgatggcaacatgatcaaagcacccggcggcgacaagatcgtcgaacgtcagggcatgacggtccatttgctcgcggatccacgccaccgcagcgagtttggctgaatcagactcggacatgactctcgtgagaggcccgctgcatttccgcgggcaatgaaaaaccggcgatggaaccgcaggccggtcggatagccgtgattctacagcctttgcccggcgctgctgcgtttccgtcgtgggcgcgcggccaattgccgtgcgcttgccgcgctcgtccgctgccgagtgacagcaatgtcatgtgccggtcatgctcgtgtgggcacgcgctgcctagacttgcttcaccgccgcccatttcgggccggcacccttacggagaagcgactcatgcaagcactcaggcaagtctttgtggccaccgcccttattgctgccgtggtcggcactgcgcaggctgcaccgcgcagtgccgatccgttcagcgacggggcgcacagcgccaccggcacccgcagcgcgttcacggacggtgcgaacgccgcaacgggcccgcgcagcacctttaccgacggcgcgcataaccccaacggcccgcgcgacagcttcagcgacggcgcgtgacggtagccggccgggcagcgcctcagcgcacctcgccgtagatgcggcgcgcatcggcggcgtcggcaatcggccggcccagcgtcaggccgccttgcaccgcctgcgccaccagcgcatggttgccggctgcgcggctgccgtcgcgcagcagcaggttgttctcgaatcccacccgcacatggccgccaaatgcggcggccgcggtcacgcaggcattctcttcgcggccgaaggcgcagatcgcccacggcaacgcgtcgccggactcgcccgcggcctgcaggaacggcagcaggtcgtgcggcgacgacacctgcccggcggcatagcgccccagcacgtacagcaccgaccatgcgcccggcggcaccatgccgcgctcgcgcatcgactgccagcgccgcacatcggccacgtcatacaggatcacctgcgtcatcacgcgctcacgcgccagccaggcgaagaacgccgccagttcgctgtccgggatgtctggcacggcgacttcgcgcaggcccaccgaaacggcttcgggccgcagctcacgcaccatcgccatctgctccgcggcctggtagacgcccgcggcctcgctcgtcacctgcaccagcaacgcttcgcccacggcctgcttcaccgcggccagcgcgtcgcggtaggcctgcacgtcgagcgagtggcggccttcggcatcgcgcacatgcatgtgcatcatggccgcgccggcatccaggcaggcgcgcgcttcagcggccagtgcggcggcggtcagcggcaccgccggatggtcgctggcgcgcttgtaggcgccgttgggcgccacggtgacgatcagcggcgcatcggccagcggcacgcgggccgcggctacgggggcttgggaaggggtccgggtcatggctcgatctcgggcagttcaggcgcgatcagcgccaggccggcgcgcagcaggctgtcatagcgtgcgcgctcggcggcaatggtttcgggggtccactggtagaagccttcgccgcgcttcatgccgtggcggccgtcggcggcgcgctcggacaggcagcgcgccggatggtcgtcgttgcagaaggtcgggtacatggtggcgccggcggccgcgtgcacgtcgatgcccgcgtggtcacgctgcagcaccggcccggccgccaggaagcgaaagccaaagccgaagcgcaccgccgcatcgacatcctcgggcgaggcaatgccgcggtcgatcaggctgaatgcctcgcgcgacagcgcatgctgcagccggttggcaagaaagcccggcaggtccttgcgcaccttgaccggcaccatcgcgcagcggcgcatgaaggcgatcagcgcgtcggcacaggcctcgtcgctgtcatcgcccatcaccacttccaccagcggcaccaggtgcgccggcatgaagaagtgcaggccgagcatgcgcacacgcgagtcgagtcccgcgccgatggcgctgatcgggaagctggagctgttgctggccagcaccgtatcgggccgcgcgcgccgcaccagctcggcaaagagcgcctgcttcaggtccagctgttccgggatgcactcgatcaccaggtccacggtggaccagtccaccgcatccagcgtcgcggccaccgccaggcgctccgcgccttgttcacggccgatcgcggccaggttgccgcgcacgcgcccgggcatggcgccggcgcggccggcatcgggctcgaccacggtggtgcggcacagcgcgcgggtcagcaccacggcaacatcggcgcccatggtgccgccgcccaccaccaccgcatgcgcggcgccggggcggctcaggatgaccggtgcggtcgggttcggcataggttctcccaggggatgcgacgtggcgcgcactcgccatcgcgacaaatcctgatggcggggcatcgaatcccggcagtgtagagaacttgctttgattgaagaagtcgattctatggatagaatgatccacaaatcagatcaatcgtgtgattcggccggcggacgccgccggcccgctgccgcagatgaaaatcaacctgtcgatgcgcgacatcgaaaccacgctggtgcttggccgcacgctcaacttccgccaggccgccagccagctgcacgtgtcgcagtccgccctgtccacgcagatcctgcgcatcgaggaatccctcggcgtgcgcctgttcgaccgcaccacccgcaacgtgcgcctgaccgcggccggccaggtcttcatgcagcaggccgcgctgctgcaggcggcgttccgcggcgccatcgacgccgtgaccggcattgccagcgccgagcgcggccaggtggcggtggcggcgctgccctcgctggcggcgcgcatgctgccgcgcgtgctgatggcctaccaccaggcgcgcccggaggtggcgctgaaggtattcgataccctctccggcccggccttcgacctggtgcgcgccggcgacgtggatttcgcgctgaccgcggccgacccgcaacaggctgacctgcagtatgagccgctgctgtcggaccgcttcgtgctgctgatcccgtcggcgcacccgctcgcgcgcagccccgggccgctgcgctgggccgataccgccagcgcgccgcatgtgtcgatgacgcacccgagcagcgtgcgccagtacgcggaatgggccttcctgcagaaccgcatccgcttccagccggtattcgaggccgagcgcctggccaccatcgcggccatggtcgaatgcggcttcggcgtggccgcgctgccagagatcgcggccggaacggtgcgccagcccggcattgtcgagcgcctgctgaccgcgccggtgaccgagcgctcgatcgggctggtgacctcgcgcaaccgcagcctgtcgccggcggctgccgaactggcggcggcggtgcgcgcgcagctggcgagtccgcccgtccaggatacggtggacacgacggcccggtgaactagcagatgctggctggccatggcgcgcgggcgacgccggcctggttccaagccaacctggtgcgcccgccgctgcgcggcgtcacggaaaacaagggcgggcccggcacggcgccaggcccgcaaccctcaggagggatcctttgtacgggtacgcgagaccgccgccatgatgccgatgccaagcacgatcaggcaggcaataccgatatacacgggcgcgaggccagcggtttccatgccccagggaacgccggcaaccaggaccaacaggccgataatgtatagcgcgaatgacatgagtcggctccttgcggtggtgcaacctggcttcaatgtaggcagggcgcgaggcgcaagggataggacaagggcggaagctggcgtaggcgggttctgaccttgtggtgttgtgcgcggcggtcagctccggcggcaaagcctctccggggctcacccctccacctgcgccggcatctctgccagccgctgcaccgatgcccgcagaccctccagtatcgtgtccgccaccttctgcggaaaacccgcgggcagtgctgcgccgacctcggcgatcaccgccggggtccgcgcgatgatgcgcccgatcagcgcctcggcatcggcacccaggaaacagcgcggtgccatcgcattgaaatggcggcgctggatatcgcgcaggccgtagtgccggctgcggccggcgaccgccatggccagcttggccttgtgccaggagaactggttggcgccctggcccaccaccggccagatcgacatcacgtcgtacagcggcgtcatgcggtagcgcccgccggccagcaggcggatgctgaagttcttggcgtgcccgtccggtgccgccagcagccagaacagcaactgcgcggccagcagcgtctgcagatcatcggcctgggccactgagttgcgcagcaccgtggcgatctcgatcatgccgggcccgccatcggcctcgtatttctgcagcgggctgtggccgaacacctggcagaaatcttcctgcagcagccgcagcagccaattgcctgacggatgaggctggcggtcgaaacgcgtgacgctcagcaccttgcggcggccgaacgtcagcatctcgcaatcggccaccggcaagccataggcggcaaggatcttcaggcacagccattcgttttccaccgacgtgctcaggtcggccctgcggtttcccaccaggcccagtggcagcttgaaaatatgtgtggtcggggtggcgccatgcggccgcagccattggccgtcatggcgcagcagcgccgtcttctcctgcgcgccggcgatggagatgcggaagtcgtcgtcgtgctcatgccgcccaagcgcgggggtggcgacgatatcctccagccagcgctcgatctgctcgtccgatagcggttcgccttcgatccggtcgatgcccgcaggcgcttggtcttcgcccaggatctgcaccgcgcccacgcaatcgcggccgatggcggcgagcagctcgaaggcttccaccgagccggtctggaagcgcagcgccaaccggcgccggatggcctcgctgtccggcaacaggttgtcgaagtagttgcgcacggcatccccacgcaccacgcgccggttgcccaggccatacccgagcgacagagacaggggccgcccggcttcagagcggatccagtcctcgtcgtattccagttccatcccggtaccggacggctggcgccaggtgcccacgcgctgcccgttggcccagaccgacaacgccggcgtacgtgacctgcgtgccaccatgattaccacgccacgtcggacacctcggcggcccccgtggcccggtcctgaaccaccaattccagcccgagcgcgccgaccagcgccagcaactggtcgacgctgatggtgtcggggttcagctccatgtgcgacatccggctctggctgatattcagccgcgcggcggcctcggtctggttcaggccggccgccttgcgcgctgcctgcaggatctggccaagctgccagggagtggagacgatttgcttcatcgtgccgatggaataccaatatgataggtatttctattttagcgacaacatgggtatttttcaaatacctatttcataggtatttcctatttaacgatgtcatgactatatgtgcccgaagccgcattctgtagcgcagcatcgtgccgggctctgtatctgtcccccgcccccgcgcccccgtatactctggggccggaggcggcccagccgtcccgccggcggaggaccctggcgtggcatcacgcaaacggggccgcgcctcaccgatcccaaacatacaagcaacggagcagcagcatgcgtgtcgcatttctcggactgggcgtcatgggtttccacatggccggccacctcgccaccaaggggcacgaggtcaccgtgtacaaccgcaccgccgccaaggcgcaggcctgggtcgggaagttcggcggcaaagcggctcccacgccggcacaggccgtgcgcgatgcgcaggtggtctgctcctgcgtgggcaatgacgacgacctgcgcgcggtgctgaccgggcatgacggcgccttcttcagcgcgcccagcggctgcattttcgtggaccacaccaccgccagcgccaacgtggcgcgcgaactccacgccgccgcgcgcgagcacggcctgcactttgtcgacggcccggtctccggcggcgaagtcggcgcggagaaaggcatcctgaccatcatgtgcggcggcgatgccgacgcctatgcgcgcgccgaaccggtcattgccgcctacgcacgcgccgtcacgcgcatcggcgaatccggcgccgggcaactggccaagatggtcaaccagatcagcatcgccgggctgatccagggcctgtccgaggccatcgcctttggcgagcgcgccgggctggacatgcgcctagtgctggacgtcatcagcaagggcgcggccggctcatggcagctcgagaaccgcggccccaccatgatcgacaacaagttcgacttcggcttcgcggtggactggatgcgcaaggacctgggcctgtgcctggacgaggcgcgccgcaacggcgccggcctgccggtgacggcgctggtcgaccagttctatgccgacctgcagcagatgggctgcggccgcgccgacacttcttcgctgatcaagcgcctgcgccagcacgccggcgtcgcctgacgccaccgctgcgccacctgcgtcgtccgattcctacagcgcaatcggcgtgtctcggagaggcccctgcccggcatgggcctaagctggacacatggggccggttgcctgcaactggcccgccaacgatgcaggagaccatcatgtggaaactcgcaggtgcactactggtaagcgcaagcatggcgctggccggctgtacggcggcgggcgcggtggccggcggcgtggccggacacgagctgactgacggcagcgccgccgggaccatcggcggtgccgtggtgggcggcgtgattggtcacgaactgggcaagtaagcaaaccctggcccctgggcccaacaagcagaaaggccgcttcgcgcggcctttctgcttcttttgcgggttcaggctttcggccggcacgacgcgtcgccggccgcccgccgcagccgctgccacaccaggacaggcagccgcagcatgaagccggccagcagccgcaggtgcatgccggtcagcagcaggttgtcgtgcagatagcggaagtgcgacaccccaccctcgcgctggccgaagtagcgcaccggggcgtcggcattgatggggcgcacgccgcgccagcacagccgcaccgccacttccgggtcgaagtcgaagcgacgcatccagcggctctcgcgcatgacggcgcgcagcggcgcgatcgggtagacgcgaaagccgtacagggaatccccgatgcccgcccatagcgtctcgacatccgcccagaagttggacatgcgccgccagtagacccgctcgcgcggcgcgctggcgtcgaagacgggccggcccagcaccatggcgcccgggttgcgctgtgatatcgccatgaattgcgcaatcaggtgcgcggggtgctgcccgtccgaatccatcaccagcacatgcgtgaaaccggccgcggcggcggaatcgatgccatgcagcaccgcggtgcccttgccctggttgtgcggcagcaccaggacgcgcagcccgggatcgatggctgcctgcgccagcagccactggtcgctgccatcggtgctgccgtccacgaccacccagaccggtgtccaggcggcgcgcgccgcgcgcagcacctcatgcaggcgcacgccggggttatagctggggatcagcaccaggtgcgtggcggacggctcggcgtcacccatcgggcaggcgctgccgccggctaccagtgcgggcccgggcatggcttgctgcggcatgtcgtgctccggtcctggctttggaaaggggggaaggttgggtgcggctgccgaactagcgcgtacggtgttccgccagatagttggccaggctgcccagcgaggcgaagatggtcttgttgtcggggttgtccgaacgcagttcgaccccgtacttgcgcgacaccagcagtgcgatctcgaggatatcgatggaatccagcccgaagccttcgccatagagcggcgtggcggcgctgatgtcctccagccgtagctcggcaatttcgagttcgtcgatgatcaggcgggcaagttcggtttcgagttcggtcatgtcgctaggtggctggaatgccgctgcggcatgggtccgggcaaggttgtccaggccgcatggcagggcaaccgatgctatcaaaaggggcaaatcccagccagttgagagaagtttagtaacaacaaaggcaggccttttgggaatcatcaccacgtcgggccggtcttttggggtataaagcgttcgcttcgcgcaccacgcggcgccatttccggcaacgccgtgcaccaagcgacttacgctacacacaatataccctcgcagatgccatcgagccagcaattcgaccgcccctccacgcccgccgcgccagccacgcctgtacggcaggatgccgtgccggcaggccggcgccatggctggattgcagcggtggccgcctttgtcgcctacgaatccgccctgcaccatgcggcacaccagccaggtgccgaagtcgccgcgctgtggctcggggcggcgccgttcctgctgatcggcttccttgcctgcctccgcacttgggggcgcctgcccgcaatggccgccttgctggccgcctgcgccgccctgtggatctggcgcatgccgttggccgcgcatttcggctggacctatttcctgcagcacgccggcatcaatgccgcgctgggcgtgatgttcgcgctgagcctgcgtcccggccgcacgccactgtgcacgcagatcgcgacggcaatccatggccagctgccccccgcgcacctgcgctacacgctgcgcgtgacccaggcctggacgctgttctttgccgcgatggtaggtgtatcgacgctgctgttcgtgctcgcgccggtggcgacctggtccagcttcgccaacctggccacgccgctgctgatcgcgctgatgttcgtgggcgaagccgtgtgccgccgcgttgccttcccgggcatggcccacggcggcctgctggacgcggtgcatggctatcgcgcagtcatggctgcccgtgcggaccggcccggtttgccgcgctgacgcgccgcaaaccggcccctacactggcaacaggcacaggctcagccccatgaccatgctcccgatcgtcgcgcatgcctcgcccgaagacatcatcgcctgggcgcacggacggcctgtcagcgtgcgccagttcctggcagatgcgtccagcctggccgatgcgctgcccgcaggcgggcacgtattcaacgcctgcaccgaccgctaccgcttcaccgtcggcctgtgcgccgcgctgctggcgggcaaggccaccctgctgccgccatcgcatacgccggagatggtgcgccagctggccgactttgccccggacgccttctgcctgcacgaccagcctgacgcggcattcgccatgccggcgttccactatcacgacggcctgcgcggcgcggccacggacgggccggtcgagatcccgcggattgccgcgacccaggtcatggcgtacgtgttcacgtcaggctcgaccggcacgccggtgccgcaccgcaagacctggggcgcgatggcccggtgcgcgcaggccgcggcacagcggctcggcctgctggacgggcgtgcctggaccgtggtgggcacggtgccgccgcagcatatgttcgggctggaggccacggtcatgctggtgctgcagggccgcgcggccctggtgtcggccccggccttctatcctgccgacgtgcacgatgccctcgcctcggtgccggcctcgcgtgcgctggtcagctcgcccgtgcacctgcgcacgctggtgcagtcgggcatggcaatgccgccggcagacctggtgctgtgcgcgaccgccccgcttggccgccagctggcgggcgagaccgagaccctgttcggcgctccgctgtgcgagatctacggtagcaccgagaccggccagatcgccacgcgccgcaccgcgcaggctgatgcctggacactggtgccgggcgtgcggctgcaggcacgccagggcgccggcggcgccgagacctgggccgaaggcggccatatcgagcagccggtgccgctgggcgacgccatcgcgccgctggatgccggccacttcctgctccatggccgcaaggccgacatgctgaatatcgccggcaagcgcacctcgctggcttacctgaaccaccagctcacggccatcgacggcgtgcgcgacggcgcgttcttcatgcccgatgatgcgcacgaaggcgacacgcatggccacgtggtgcggctggtggccgtggcagtggcgccaggcgtcgccccggcgcagctgcagcaggcgctgcgcgcgcgcatcgacccggccttcctgccacgcccgctgctctttgccgacagcctgccgcgcaatgcggccggcaagctgccgcgcgaggccctggcggcgctggtcgcaaggcttgccggggcgcaccacggcgatagcgcggcaaggcccggctttgtcatcgacgccgatcacccggccatcgccggccactttcccggccatccgatcgtgccgggggtggtactgctggaccacgcggtgctggcactcggcattgcaatgggccgccgccttgccgtcaccgaggccggcaccatcaagttcctgagcccggtgaccccgggcgagcgcgttgagatcctccaccaggccgacgcagcggccgatggcggcgtgagtatccgcttcacgctgcgcagcgccggacgcgacgtcgccagcggcacgctgcaggtgcgcggtgccgcgacgcacgcgggggcatcggcatgctgagctggctgtggaggcggcagccgccgctggaatccgaatggtcgcgccgccaggagcgcggcagcatcacgctgctgcgcgtcatgacgtggatctcgctggcactcggccgccccgtcgggcgcgtggtgctgcgggggattgcggcgtacttcatgctgttcgcgccggcggcacgccatgcctcgcgcgcctacatgggccgcgccctcgggcgcgatgccaactggatcgatggctaccggcatgtgttcaccttcgcctcgaccatccatgaccgcatctacctgctcaacggccgcttcgacctgttcgatatccgcctgcacggagaggaacagctggaagccgcgatggcgcgcggccgcggcgcaatcctgctgggtgcgcacctgggcagcttcgaggtggtgcgcgcgctcgggcggcggcacccggacatggaagtcgcgatcaccatgtacgaggaaaacgcgcacaagctcaatgacgtgctgacgtcgatcaacccggcgatgcgccaggacgtgatcgcgctgggccgcttcgacaccatgctgcgggtgcgcgactaccttgaccgcggctacatgatcggcatgctggccgaccgcacgctgtcgcaacgcgccaccgacccggtgcagcagtgcagcttcctcggcacgccgaccggccttccgaccggcccgctacgcatggcggcgatgctgcgccggccggtgttcttcatcaccggcctgtaccgcggcggcaaccgctacgatgtgcacttcgtgccgctggccgacttcaccgaaaccgcacgcggccagcgcgaggcagccgtgcaaaccgcgctggccgaatacgtgcgcctgctggaacaattctgccgcagcgccccgtacaactggttcaacttctacgatttctggcacgccggcccgccgctgtctgaacagccgccgccgggcaacgagccatgacccgcgagccctgagcagcccctgatgcccctttccagacgccctttccgcttcctgctgtcgatgctgctggccggcgccatgcttgcgctggccacgccgtccggcgccgccacatttggcgtcgaccagctgatgtccaccctggcgcagcgcaagtctgggcgcgtgctgttcaccgagaccaagtacctggcgatagtcgacaagccggtgcagtcgtccggcgagctgctgttcacggcgcccgaccacctggagaagcgcacactgtcgcccaaggccgagaacatggtgctcgacggcgacatgctgacggtcgagcgcgacggcaagcgctacaccatgccgctgcagaactaccccgagctggctgcctttatcgaaagcatccgcggcacgctggcaggcaaccgccagacgcttgagcgctactacaagctcggcctggaaggccgtgccagccgctggacgctgacactgactccggcggactcgcgcatggccgcggtggtcagccaggtgcgcatcgacggcagccaggatgcgcttgaccgcgtcgagatccggcaggccgacggcgaccgctcggtgatgaagatccgacctgccggccgcccatgagcgcagcgccgcccgcaacgatgcgcccagcgatgcgccggctcgcgctggcactgtggatcttcgccatgctcgcctgcgcggctgtgatcagccgcaccaccttcacggccgacctctcggccttcctgccgcgcctgcccagcgccgagcagcaattgctggtgaaccagctgcgcgacgggctggtatcgcgcctggtcctggtcgggatcgaaggcggcgatgccgatggccgcgccgcggtgtcgcgtgccatggcggcacagctgcgcggcgacccccgcttcacggcgatccagaacggcgagccggtcaaccaggatgcagaccgccaatacgtgtttgcgcaccgctacctgctcagccccgcggtcacgcccgagcgcttcagtgaacgcggcctggcgcaggcgctgaatgaatcgttcgagctgctggcctcgtccgccgggctcttcaccaagtcgctgctgccgcgcgatcccaccggcgaagtggccgcgatgctggcacagctggatgccgggcagcgcgtgcccatgcacgccggcgcctgggcgtcgcgcgacggcaagcgcgcggtgctgctggcgcagaccgccgccgcggggtctgacacggatgcgcaggcacaagccatcggggccgtgcgcgaggcgtttgccaaggctgcgatcgctggcaagtaccagctggcgatgaccgggccgggcgtgttctccgtcaatgcacgcgacaccatccgccatgatgtggagcgcctgtcgaccatcggcgtggccatcatcgtcacgctgctgctgctggtctaccgctcggtgccgctgctggtgctggggctggtgccggtactgagcggcgcgctggcgggcattgccgcggtcagcctgggcttcggcggctcggtgcacggactgacgctgggcttcggcaccacgctgatcggcgaggcggtcgactattcgatctacctgttcgtgcagtccgcgcagtacacgcgcgacggccggcgcgacgagcgcgcctggctgggcggcttctggccgacggtgcgcctgggcgtgctgacctcggtctgcggctttgcctcgctgctgctgtcgggctttccggggctggcgcagctggggctgtattcgattgccgggctggcgaccgcggcgctggtgacgcgcttcgtgctgccgcagttggtgccggccacgctgcacctgcgcgacgtggcgccgctgggccgccggctgcagtggctggcggcgcgcgcgcaccggctgcgctggctggtgctcgtgctggtggtggcagccgccacggtgctggccatgcaccgcggcacgctgtggggccgcgagctgcaggcgctgagcccggtgtcggccagcgaccaggccctcgataccaggttgcgcgaggatcttggcgcgcccgacgtgcgctacctggtggtgctgtccgggccggaccaggaatccgtgctgcagggcgcggagcgcgtggcccgtgaactggacccgctggtggcacagaatttcatcggcggctacgagagcccggcgcgctacctgcccagcgcggcgacccagcgcgagcgccaggccagcctgccgccgcccgacgagctggcgcagcgcctgggcgccgccatcgccacgcagccggtgcgcgcgtcactgttcgcgcctttcctggcgcaggccgaggccgcgcgcaccggtgcgctgctgcggcgcgaggacttgcgcggcacctccatggcgctggctgtcgatgcgttgctggcgcagcgcgacgggcgctggagcgccacgctgccgctgcgcgcaccggcccaacaaagcaccggcgcggccgacggcgtcgacaccggcgcggtgcgggccgcggtggcgcgggccggcgttcccgacacgctgttcgtcgacctcaagggcgaatccgaccgcctctacaccggctacctgcgcgaggccttgctgctgtcgctggccggcctgctggcgatcatcgtgctgctggccgtggcgctgcgctcggcacggcgcgtcgtggccacggtgctgccgctggccgcggcggcgctggtggtgctgggcgggctggcagcgctcggccagccgctgacgctgctgcacctggtgggcctgctgctgctgatggccgtgggctccaattacgcgctattcttcaacggccccgctgcaggcagccaggtggcgggcgcttcaccgcatacgctggtgtcgctgctgctggccaacctgaccacggtggccgccttcggcctgctggcgctgtcgagcctgccgctgctcaaggccttcggcctgacagtaggtccaggggccgtgctggccctgtggttttcggcgatcctggcgcgccccgcggcgccagacacagccaagagtgcaacatgaattcgtatcccgcaccgcgcgtagccttgcgcggcacctcttacagccgcccctggcgccccaccccgctgctttacggcgccgccgccgtgcacctgggtgcctccggcgcaatgctggcgcaccctgaggccatgggcatggcgctggccggcgttggtgccgcccatgcggcaatgtgcgccgccggcctgtggccgcgcagccactggcttggccccaatgtgctgcgcctgccgccctctgccgatgattgcgtggcactgacattcgacgacggccccaacccggcgttgacgccgcgcgtgctcgacatgctggaccagcacggcgcgcgcgcgaccttcttctgcgtcggcgcgcgcgccgcggcgcatccggaactggtgcgcgagatcgtcggccgcggccacgccgtggagaaccacagcatgtaccaccggctgcacttctcggtgttcggtcccgggcgcatgctgcgcgacatcggtgccgcgcagcaggtgctgaccgacctcaccggccaggcgccgcgcttcttccgcgcgcccgcggggctgcgcaatcccttccttgagccggtgctgtgccggctcgggcttcagcttgcggcctggacccggcgcggcttcgatacccgctgcggcgaccacgcggggcgcgtggcgcagcgcctcaccggcaagctcgccgggcgcgacatcctgctgctgcacgacggcaatcccggcaccgatgccgccggcaatgcacattgcaccaccgtgctgccgggcctgctcgctgccatcgaacgcgccggcctgcgctgcgtcacgctgcgcgcggccgtgccgacagcctgagtgagcggcggcttgttacaattggcacagccttccgagattccttccattcgttccccctaagccgtgtccccgctcctgttctcgcatttcacggccaccagctgccttggcgccggtgtagacgccaccctgtcggcactgcgtgcgcagcgcggcggcctggcgccctgccgcttcggcggtgtcgagctcgataccttcgtcggcgaagtccccggcctggacaccgtggcactgccgcccgcactggccgaattcgactgccgcaacaaccggctggcgcaactggcgctggagcaggacggctttgccgcgcgcgtgcgcgaagcggcggcgcgctacggcgcccaccgggtcggcgtcttcctgggcaccagcaccgcgggcgtgctgcagacggaactggcctatcgccagcgcgatcctgccagcggcgcgctgccgccgggcttccattacgccaccacccacaacccctactcgctgcccgccttcctgcgccaatacctgggactgaccggtcccgcggctgcggtgtcctcggcctgttcatccggcgccaaggtgttcagttcggcacggcgcatgctggaggcagggctgatcgatgtggctgtggtcggcggcgtcgattcgctgtgccacaccacgctgtacggcttcaattcgctggagctgttgtccgaccagccgtgccggccctatgacgtggcgcgcaacggcatctcgatcggcgagggcgcggcattcggcctgctcgagcgcgtggccggcagcgcgcaaggcgatgccatcctgctggccgggatcggcgaatccagcgatgcgcaccatatgtcgaccccgcaccccgacgggctgggcgcgcgcctggcactagagcaggcactggccagcgcgggggtcgcgccggcgcaggtcggctacgtcaacctgcatggcaccgccacgcgcagcaacgacgcggccgaggccatggccatggccgcggtgctgcccggcacgccgtgcagctcaaccaagggcgccaccgggcatgcgctgggtgccgccggcgcgctcgaagccgtcatttgcgcgctggcgctgcgccacggcctgatgcccggcggcatcaacaccacgcaggtggatccggcgctggacgtgaactaccagctcgccaaccgcgaggcaccgctgcgctatgcgatgaccaatgccttcggcttcggcggatccaactgcagcctgctgttcgcccgcgcggacgcggcttcccactgagcatcgccatgccgcagcacgtgtatatcgaaagcatcggcctgctcggccccggcctgaccggctggcagcaggccgccgaagtccttgccggccgcgtgccatacgcgcacgcgcccaccgaactgccgccacccgcgggcctgccgccggccgagcgtcgccgcaccggcccgaccgtacggctggcgcttggtgtcggccagcaggccgtcgccgccagcgactgcgaagccgcgcagctgccgacgatctttgcctcgtccagcagcgacggcttcaacttccatgcgatctgcgaagcgctggccgagcccgagccgctgatgtcgcccacgcgcttccacaactccgtgcacaacgccaccgccggctactggtcgatcgccgcgggcgcgatgcgcacctccaatgtgctgtgcgccatggatggcagtggcagcgcgggcttgctcgaatgcgtgctgcaggccgccgccgatgccgaaccctgcctgctgatcgcctatgacaccggctaccccgagccgctgcatagccaccgcccgatccccgatcccttcggcgtggccctgctggtcacgccgcggcagagcgcgcgttcgctcgcgcgcgtcggcgtggcgctgaagcaggcgccagccacggtgatgccggacgccgcgctggaagcactgcgcacgtcggcaccggccgcacgcatgctgccgctgctggcggccatcgcccgcggcgaggccaccaccgtggtgctcgattatctggatacgctgcagcttgcggccgaggtggaaagcctcggcggccaggcggatggctgagctgctgaaagaccgcgactggatcgcggcacgcattccgcaccagggcacgatgtgcctgctcgacggcgtgctggcctgggatccggcatcggttcgctgcacgtcagccacgcatacgcgcgcggacaacccgctgcgcgcgcacggccggctggccgcgctcagcggcattgaatacgcggcacaggccatggccgtgcacggcgcattgctggcggaagcggaatcaggaatgggcgcacagcgcccgcgctcgggctacctggccagcgtgcgcaagctggtgctccatgtggagcggctcgacgatatcgacgcgccgctgcaggtcgaggcacagcgcatcagcggtgaaggcagcagcgtgctgtatgccttcaccgtcagcgccaagggccaggcactgctgtcaggccgcgcggcggtcatcctggatgccgccgcagtcggccaaagcgccgaccgcggcgccggctgaagcgcttcagcgcgccggcaggatcttgcccgacaccgcgccgaagccgacgcgatagccttcgccctggcagtagccggtcatgatcacgtcgtcgccatcctccaggaaggctcggcggctgccgtcggccagcgtcaccggctcggcgccgttgcgggtcatttccagcaggctgccgtaggagtccggcgtggtgccgctgatcgtgcccgagcccatcaggtcgcccacgcgcacattgcagcccgacaccgtgtggtgggccagctgctgtgccatggtccagtacatcgccttgaagttggtgcggcagatggtgctgggtgccgctgcgccctgcggctgcagcgcgacttccagggcgatgtcgtaggcattcttgtcctgctgctgcaggtacggcagcggctgcggcgattgctcggggttgtcgcggcggaacggctcgagcgcttccatcgtcaccacccacggcgagatcgaggtgccgaagcccttgctgttgaacggccccagcggcacgtattcccactgctggatatcgcgcgcgctccagtcattgagcagcaccatgccgaacatatgcgccggcgcatcggcggtgctgacgggctcgcccagcgccgattccttgccgacgataaagcccatctccagttcaaagtccagcttgcggcaggcgctgaagatcgggcgtgcctcgttcggcagcttgatctggccgttgggacgatgcagcggcgtgccgctcaccaccaccgagctggcacggccgttgtagccgatcgggatttccagccagttcggcagcagcgcattgtccgggtcgcggaacatgcggccgacgttggtggcgtgctccctggacgaatagaagtccgtgtagcccgggatctccaccggcaggtgcagcgtcgcggccgacatcggcaccagtgcctggtcgcgcagggcggcgttgtcgcgcagcgcggcgtcatcaccagacagcagcgcgcccaggcgcttgcgggtttcgctccacaccggcttgcccaaagcgataaagcggttcaggctgcttgcggcaaacgtgcctttggcagcggccggcagcaggccggcctcatccagcgcggcgaggtccagcacctggtcgccgatggcaacgccgacgcgcggggcctggcccttggtcgaaaacacgccatacggcaggttctgcagcgggaagtgggactggccgtcgttggcggaagcgatccagctggtcttgggggcggtcattgggatactccgaaaatttggtggcacttgtcgcgtgcggtgacgcatcatgctcgacgagcgccggctctctccgcccggcccctctcccgcttgcgcgaggggagaaagccgggcgggcggccaggcgcgcgagatcagcgggtgttcgggttgaagtgtttcttcaggccctgccagcacgtgtagtagtcctgctgcagcgaggccgactgcgcggcatacggcgtcgggcggatcacgcccggggtctcgaacatgaaggccatggtgtcctcgatgcggtgcggcttcgaggtatcggcggcgctggccttctcgaaggtttccgcatccgggccgtggccgctcatgcagttgtgcaggctggcgccgcccggggcaaagccttcggccttggcgtcgtagacgccggtgatcaggcccatgaactcgctggcgatattgcggtggaaccagggcgggcggaacgagtcctgcatcgccagccagcgcggcccgaagatgacgaagtcgatggtgtccacgcccggcgtggccgacggcgactgcagcaccaggaagatcgacggatccgggtggtcgaagctgatcgaaccgatggtattgaagcggcgcaggtcgtacttgtacggggtgtagttgccatgccaggccaccacgtccagcggcgagtggccgatcccggcgcgccacaggttgccctggaacttggccaccagctcgaaatcaccctcgcggtcttcatagctggcaaccggcgacaggaagtcgcgcgggttggccaggccgttggagccgatcacgcccaggtcgggcagctggaacaaggcgccgtagttctcgcagatatagccgcgcgcctcgccgtcgggcagctccacgcggaagcgcacgccgcgcgggatcaccacgatctcctgcggctccacttccagccggccaagctcggtcaccatcagcaggcggccctgctgcggcacgatcagcatctcgccgtcggcgttgtagaagaaccggtcctgcatcgactggttggccaggtacaggtggatgccgcagccggtcatggcctcggggccgccattgccggccatggtgacgatgccgtcgacaaagtcggtcggcaccgacggcattgccggcgggctccagcgcatctggttgggcgacggcggcacctggtcgaaacggctcaggaaacgcgactgctcgatctgcgtgaacggcgtatgcatcgcggccgggcgaatgcggtacagccacgagcgccggttgtgcgcgcgcggcgcggtgaaggccgtgccggacagctgctcggcgtacaggccgtagggcgcgcactgcggcgagttccttcctacaggcagcgcaccgggcagcgcctcggtggcgaattcattggcgaagccggacatatagccgtgctcggcgagctgggtgtgcgtgagtgtcatggtgtcgtcagcgttcctgggtctcagtccatctggcgctgcgctggcgcctggcggcctctgctgggagtgcctgccggtccgtattcagtctgtgcgcggtgcacggagcatgaattacgtaatgcgtaatgaatttaccatatcgtaatagccaacttcggacgtgtcaaacggcaccgctgacgcatgcgtcgaacgccgcttgcattgcagttgtaggtgggaaacgggaacagcgggaaaaagcaggaagcgccgggatgcgcgcgtcgacgcctgcgcggcggcagttgctcacgcagcgggaaaaaccaggaaatgcgggaaagcgccgaagcaggcagccaggcctgcggcgtcatccacgccaggcgtcgcgaacggcgctcaggacggtagcaaccggcgcagtgcggaaagccccgcaccggttgtcatgggtggcctggaggccagcttccagtgccggcgcgttgcgaacgcggccggccaggcagcggccagtcagaccggcttgtggccctctccggtcccggagccgaaaccgcctccggaagccggtgccgcagccggcgcggccgtgcttccggcggccggctggcctgccatggaagctgccgtcacgccgccattgcggctggcaataaatgcgttgacgtctgcagcaagatgctgcggggccagcacgacttccaggcccagcgcctcgcaggcggccaggaacgtcgacatgcggggatcggcctgacccgactccgcccgcaggtaggcttcccgggaaatccccgctttacgggcgacgtcctcctgcttgagcttgcgcgcgcgacgcaacgcccgcagttgccggaacggttcgctagcgcctcttggcacggctgtactgttcatgtcggtctccagtcaccagtgaaaaaaagtgcgcggacgtgcattcgagtatagagcacgcaaagcgttccgtatgtaaccgcagaaacactttgtgcagatttcttagaagtccgcaatcccgccctgacatcggccggttggcgaacatcaaagagccggatcgtgcacaacaacgctgcaccgcccagtctctaacgggccttggcggtttgcgttgacgtcacatgcatatccatatgacgttatggcctcccggacacaagtgcgcaagtcggggcaaataccatgcatctggtttcgttgacaaaccgaccggtcgtgctattctccacaccatgcagaaaggacaactcacccgcaacgccatcgtcgaacaggcactggacaccgctgccaaggtcggcttcgaacaattgtcgctggccacgctggccgcggacaccaatatgtcgaagagcggcctgtatgcgcacttcaagtccaaggaggtgttgcagcaggcagtgctggacctggccgttgagcgcttcggcgagatcgtgatccggccggcgatgcgccagccgcgcggcatgccacgactgcaggggctgttcgaaggctacctggaatggctgggcggcacggtgacgcagggacgttgcctgttcacggcgctgggccaggaataccgcgaccggccgggctcgatccgcgacctggtggtgcagtcgctgaaggattggcacagcacggttgcgcgcgtggtgggcgacgccatcgatgagggccatttcgggccggataccgacccacggcaatttgctttcgaactctcgggtatcggcatggccttccagcaatcgttcaagctgctcggccgcgacgatgccgagaccatggcgcggcgcgcatttgcggccctggtggcccgtgccgccgagggtgctcgcggccactgatccacacattggcgccggcgcaatcccgccggcaggcagcaaccgctccggcggactttttttgtaccgaaaaaagcacgactggtcggtcgtaacaacagcacggaaagccgccggcggggccggtgccgatgatgccgtgccatccagaatccattggaggtgcaggtcgtgacgcaagcagtctcttctccttccccggtttcctcatcccgcaccgccgcgcccttgcccgcgcgcgccggcgatgcgccgctgcgccccggcaagtccggcgcggtggagcgggccttgcagggctggcagcggttgcgctggctggcgggcagcgtggtcaggcccggcgcgacagcgcgggcgctggagcacatctggttcaagccgccgcgcgccgccgccacatcggcagcacggcgcctgctggacagtgcgcgcgccgactgggcgctggtgacgggccagggcccgagccggcgcgtgcgcgtctatcgctggggcaggtccggccccgtggtactgctcgcgcacggctggggcggacatgccggccagtggcatgcggttgtcgatggcctgctggccgccggcatgcgcgtggtggccttcgatgcgctctcgcacggcgcctccgatgccggcgcacgcggcgcggcgcagacctcggtgctggaaatgtcgcgctcgctgctcgccgcggcctggcacgcggggccggtgcacgccgtggtggcgcactcgctcggcggcgcggccaccgcgctggcgctgcgtgagggcctgcccgcccgcgccgccgtactggtcggatcgccggccgacatgcacgccgcgtgtgcgtcgctggcctggcaaatgggcttcacgcccggcgtgctggcacgcatgcagcgccagagcgagcgctggctgggactgccatggtcggccttcaacgtgcccgacgtcggccgcacccggccggtcccgccaacgctggtgatccatgaccgcgacgacaaggaagtgcgctgggaagacggtgccgccatcgccggcgcctggcccggcgcgcaactggtcacgaccagcggcctggggcatcgccgcatcctgcaggatcccggcgtgatccggcacatcgccgatttcatccggcccggcacagcccccgcgcgcgcggcaatcccgccagcgttgcacgggctggccgtcgactgagcctggagaccatcatgttcctggtgagcaatgacatgaccgccaccctgcccgcacgcagttcgctgcggctggcggcgggccccggcgaacacgtcgccgtgcgctgcacggaaggcgaactctggctgatccgcgacggagacccgaaggatacggcgctgacggcgagcgagagctttacgttgtccgacagcggccatatcgagctgtatgccgtcaccacggcatcgctgcacgtaacgcgctgccggcaaggcgccgggccggcggcgagcgcctggcggcaatggctgcggcgcttgctggcgccgcctgggcgcggctttaccggcgcaggccgatgatgcgcggggctgggggcgccccctggctctgccagccctgacgcggatgcgtggtcgtggtcgggtgcaacttatggcggttaattgcgtttttctataaaaagcgcgtcccttgcggggcacgtgtctcagatacgcaagacagccatcagcccgcgtgcgatcgcctgcagccagccacgccgccaggtcagcgtgaacgacaccgccaacgctcccgccatcatcgccagcgcccacagcagcacgccaaagccggtgcggttgcccgcctgcgcggccacggcgccaagcgccaccagcgcccaggccgcgcagcgcagccgccgccggccactggcgggcaggtccgcgccctgccccgacaactcggtccagtgccgctccgtggcgcaggcaaacagcacgaaagcgctgtacgcgcacagcgccaggcccagcagcagcaagtgttcaagcgtgattggcacggtccatctcctctagcgcctggctgctggcagcagcggtccgggcctggcgtgccgcgtcgacgcgccgcagccgtcgcgccgacgccagcgccagcccacctgtcagcagcagcacgatgtcgacgccggccagggcaaggtggccgcgcgtcagcgccagcggcaaccagtcgccggtgctcaggccgttgagcaccggcgccgccagcgccagcgcggcaatcgccaggcattgctggcgccatggcaccagcgtgcggctgcccggacgcatcgccacccgcgcatggatcgcggtggtcagccagaccaggaagaacagcccggcctcgataaactcgcgcgacggcagcgtcatcggcagcagccggttggccaccatcatcgccagcgtggcgatgaccaggcccgtggtggtacccgcggtgaccgcggccgccagccgcacgcccttttcgccgtggcgcgcatggcgcttgtcgagccagtacaactgcccggtagcgatcagcacgcaccccgccagcccggccaggaaatacagccagcgcagcggccagtgatcgaacgcgatgaagtgcatgccggtcaggaagcgctgcgtggtcgcagcgggctgcaacggcacgtgatgcagcaacgcaccggtggcgccgtcgaagtaggcggcgtcgtcggccaggctgacgcggtcgcccaccgagcggctcaccttgaccacggcgttggcatcgccggggttccacacccggatcgcggccggcgccgccccgccccagcgcgcgcgcgcggtctcgaccatcggccccagcgcggccatcggtgccgccaccccggcgggcgggcgcgagtagccggacaaggcctggtcgtagaaggtgttcggctgctggtacaacgcgctgatgccggccggcatcaggatcatgtagacaatgcagaccccggagaacgtaatcaccgcatggaacggcagcgccagcacgccggtcaggttgtgcaggtccagcaggctgcgctgcagctgcttgcgcggccggaacgtaaagaagtcgcggaagatgcggacgtggatgatcacccccgacacgatcgccgccagcatcgccatcgccgccaggcccaccagccagtagccgatgttccaggcgcgcaggtgcaggttgtagtgcagcggatagaagaacgacgacgcgcccaaggtgcccacgtcaggcagcagctcgccgctgcgcggatcggccaggcggatctgcccgcccgcggcggcatagcgcacgcgcgcgatcatcaccggggtgcgctgctcgggcagcgtgaccgcccattcgcgcagcggcttgccgctcgccagcgccgccacggcgcgcggcaccacggtgtcgatgtcgatcgtgggcggcgctgcgtccaggcgcgtggccggcatcatccagcggtcgacctcgcggtcgaacaccgccaccgagcccatgaagaacgccaccatcagcacaccgccgagcagtacgccaatccaggtgtgcgcccaggtcatggcctggcgcaggccgccggcatgtgcatcggccttctgtgcgcgggccttgttatttcgtgcgggtcgcgtcacgccagcttctcccccagccaccacgccacgccggcgccgatggccgcgccggccgccagcaccagccacacgcgcagcaagtgccgcgtcactagcgcccacagtgacatcatcggaaacaggaggaaggccagcatcgaaaaccagagcacggcctcgctgcgggccaggcccaggcgccaaccgagcgcggcgccgccggcggtgatgccccagacaaaggcatagctgcccgccagcgcggccagcgcgcgggcggtcatggccagcgcgcgcgggaaggcgcggcgcgatggcagggatgagggactgtcgttcattggaattcttcgcaacgcgcggccttcgtggtggtgcaatggcatcgcaccaccacgaaggccgctgcgtttacatcttcatgcgcacggtgaacatggccgcgcgcggctggccccagatgttgccttcgcgcgggttgttgatccgtgagtagtagctgcggtcgaacaggttggtcaggttcaggtccgccgacacgtgcttgttgaagtcgtagccgatcgcggcatcgaacgtcgcatagccgccgcggcgcagcgtgaccgcaccaatcggcgcggggaacagcgcggtgttctgcacatggctgaccgcggtcatgccgccaccgatgcgccagcggttgaaatcgccgggcaggcggtacatcgtccacagcttgaacaggtgcttgggggcaatcgccgagaacggcgtgttgacctggccggtgcggttctgcaggtcctgcgtgacgttgaacgtatagccggcgtagatggtccagctcggcgtgatgcggccgctggcttccagctcgaagccctggctcttggtctcgccctgcgacacgaagaacggattgctcggattggtcgtgttgatattgtcgagcgtggcgcgaccggtctcgcgtacctcgaacagtgccagcgaggtgttcagcgcgccctcgaaaaattcgctcttgacgccgacctcgtactgcttgcccttgattggatcgaccaggttgccgctggcggtcaggtactcatcctgcggctggaagatctcggcatagctggcataggccgaccagtgttcggtgaagtcgtagatcagcccggcgaacggcgtgaacttggcgttgatgtcgtcgccccgggtcacgctggtggtcgacgtgtactggcgcgcgctgatgtcccaccagctcagccgcccgcccagcaccagcgtcaccggatccgccagcgagaagcgcgcgtcgccgtagacgccgtactgcctggtcgtggtggtgatgcctgtgccattgggggtgaaggttggcttggcgaagtcgctgcgcgggttgaagatgttcacgacctgcgagaacggcgaaatggcataccgggggtcgcgccgttccgaatcggaaaaattgaagccgaccagcgccttgtgccggcgcccgaacagcgagaacggcccgttggcgtagaggtcgaagctggtctgctcctgcgtgtaggtctgcttggccgcgaacagcgtggtcgtgttcacgcccgggatcaccggcgtataggcataggcctgctcgcggttcaggcggttgttcaggtagcgcagcgcacccttgacctgccagccgctgtcgaacttgtgctccagctcggcgaaggccgaggtggtatagaagtggtcgcggttccagtccgcgcccaggtaagtcgagcgcggcacgtcgagcaggctggcctggcgcgtgaccgggttgaagtaggccggcagcgtccacggctggcggccttccgaatcctggtagctcgcgccgaccgtcaccagcgtgctgggcgtgatgtcgtactcgatcacgccatagagcgcactggtgcgcatattggtcttgtcgatgaacgagtccttgtcctggaacgcgccggtgatgcgcgcgcgcagcgtgccgtcggcattgagcgcgccgccggcatccacctcggcgcggtagttgttccacgatcccaccgacagcgcgccgccgatctgggtttctcgcgtcgggcgcttgcgcaccaggttgatcgcgccgccggtcttgcccgccccggcgagcaggcccgacggccccttgagcacttccacccgctcgatcatcgacaggtccggctgcacggtgttgcgccagtcatacttggtcggcacgccgtccagcatgaaggtgtcgatctccagcccgcgcgaataatagatcgaacgctcctggtcacgcttttcgacgaacacgccggtggcctgcatcatcgcgtcttccagcgtggtcaggttctgctcgcggatgcgctcggcgttgaccacggtgaccgattgcggcacctcgcgcgcggtcagcggcaccttgctgccagcggtagtaggcgggttgacggggttttcgcgggcgccgttgactgtcaccgccggcagcgaaggctccggttgccgggcgggtctgcccgcgggggccggctgctccgcctgcgttgccgacgatgccgaacctgtcacgttttcctgtccgaaagccgacgcgctgaccatcaggccaacggcggccgggatccagcgcatggcagcgcggcactgcacggacccatgccttgttgcccgcgcgcgttcggtcgcgcgtctgttgctgtgtttcatttccttcttactcccctgctcggttgtgaaaatccaggccgtgggacccggctggccgcctggtcgcggccgccggtcctcatattgctttgtatgggcgatacctcagtgcgtgccggcgtgcgcgacgcgcgcggggcggctgcgaggcggctcggcctccatggcgcatgccgcacccgcccggttgcccagcacggcggccgcaatctcttgcgcgcgcaccgccagcaccgacagcagcgtgtccgacaagccgtgcgtcgcttcgcagcagccctgcaggaatacgcccgcctggcagcccggcgccatctgcagccggtagtcgcggtcggcctggaagcccttggcgtcgtccaggtaggacgccagcggcgccagcagcgactggtgcagctcgcgccgatagcccgtggcgaggatgaccgcgtcatagcgctgcaactgatgcgcgccatcgtcacgccgcgcaatgtccagccgcacgccgtcggcatcggcctcggcatggcgggcctcgctgccggccagcaggcggtggcgcaccttgccggtgaccttctgctggtacagcacctcgtaaatggcttcgatcaggtcggtatcgaccaccgcgtagttggtattaccgaactcgcgcagcagttgctcgcgctcagtcgcctcgcgcgagaacaggtagtcgatatagcgcgggttgaagatctcgttgacgaaggggctgtcgtcggccggcttgagcgccggcacacggctgaccaggtcgaccgcaatgccgccttcgcggccatgcaggtccaggaaaatctcggcggcgctctggcccgaaccaattactgccacgcgccgcacgggcgctgtgcgctccagccgctccagcgactcgaggtacgacgacgaatggaacacccgcgggtggccccgcagcggcacgaaggcgtccggaatgctgggcgcgccgccgacgctgaccaccacgttgcgcgcgcggcgctcggtcagcgccccttccgccgtgcgcgaggtcacgcgcaggcaggccagatcgccattgccgccggcgggctcgggcgcgaccgaaaccacttcctcgccgtagtgacaggcgtcggcaaaatcacccgccacccaggacaggtagtcgttgaactcgtagcggctgggatagaaggtgcgggtgttgatgaagtccagcagccgctcgcgctcgtgcaggtagttgatgaaggtatagcggctggccggattgcgcatcgtgaccaggtccttcaggaacgagatctgcatgcggctgttgtcgagcagcatattgccgtgccagacgaagcccggtttcttctcgacaaagccgaagcggaacggtgcctgctgcggcagcatttcgcgcagggccactgccagcgcgaggttggaaggcccgaagccgatgcccagcaggtcgagcacgggccctgcaccggcatcggtgccgtgggcggcgaaggtggaagcggaatagagcatggtctctccttgcgcggctggctcaggccgccagcgcggtcggttctgcaccggacagctgcgcctgcccgtcgtcctgcggcacccacaggcgctcgccgaagaagcgttcgcgcagcagcatcaccagcatggcgcgcttgtgcgggaagtcgaaggccttgaccttggcaaacccggaacggtccaggttgcggatctgctgcacatgatcgatgcggggctcgccgacgatgcgctgcgtgcgcgggtcgtccaggaacatgtagtgcatcagcgacggcagccaggcgctgatatacgccttgccacggatctcgccgtcgccgatcagcacgtgccagccgcggtcgaagtcgtcgacgtcgtagtaggggccgatgcggttctccttggcccagtacacctcgaagtacgcgaacggcttgccgtccaggcagccgatcagcgggatggtgtgcgggtcggccagctgtgccgacaggtaatcgcgatgcttttccagatcgccttcttcctcccagaacgccgccacgcgcggatcgttcatccagccgtggaagcacgccaggtcggcatcgagatcggccacccgcatcgagaacacctggccgagccacgggatatggcgtgcatagacctggcccgacggcttgggcgcgcgcagcggatggcgccggccctgggtcatcgcgtattgcagcggatagtcgcggcccgaggtgccggtgtgccacagcgccggcagttgccagagctgctcgacgcgcgtcaccagctcgccgccggccgcgcgcgtggcgctgccctcgcgcagcattgcgttggcgatggcatcgggcaggtccagcgcgattgcctgcgtcgcgggggtgcgcgccagcaccgcctcgcaggcggcaaaggtcgcggcgcgcgccagcggatggaccgggtcggtatcggcaagtgccagccgcggctgggtgccgggcgtaaactgccaggcctgcagcggcgtgccgtcgaggcttagctgcagcgcgcagccatcccagcggctctgcagggtgaggctcgtcgcggacaaccagggctggctcgcgatcgcgtgggtcatcaaaggcgcggcattgctttgcatgtgaactgactccctgtctgtgttggcgcgcgtcatgcggcggcctgatggtcggtctggccggccgcggcgggggcggcggcgctgtcggtggcgctgtcggcgcggatcacgccgctgtcggcgccgatcacgcggtcggccacgtggaaatagcggtcgtcatggctgaccgcgacaatggtcttgccgctgcgcttgagctccggcagcagcgattcatagaaataggcgcggaacacgggatcctggtcggctgcccattcgtcgagcagcagcaccgggcgcgcctcgacataagccgccagcagcgccagccgcttgcgttgcccctgcgacagctgcgtggtcgacagcaggtcatcgcggatggcgaccttgtggtccatgtgcagccgcttcaggaaagcattggccaccgcggcgtcgaagcgcccgtccgggccgaccagccgcgcgaacagatgggcgttggagaacaccgtggcgaaatggctgcgataccagggcagctcggcggtgcccaccggccggtcgccgagcgctatgctgccggcgctcggctggtacaggcccgccagcagcttcatcagcgtggacttgccgctgccgttgccgccgacgataaagaccgtctcgccggcggacagcgtcagcgacacggggccgaggcggaagccgcgctcgtcgccctggccgggatagtcgtagcgcacgtcctgcagcgtgatcagcggcgtgcccggcgcgggcggtgcagcggcggtattggtcgaatgcagcgcgaaatcctccgtgtacggcgccagccgcagcgtctcgatcttgcgcagcgcgacgttgccggtcatcaggatcggcagcgtgccgaccaggtcgttcagcggcatgcgcaggaacatcagcaccagcacgaaggcggtgatgcgctcgcgcccaatacccagcgcatcgccggcgataaagatcgcgcacgccacccccaggatcagcgtcgcggtgaacgacaggctcagcacccagtagcggtcggcgcgcacctcatgtgcgcgcgcaaactccgcggcgggctcgaagtcgcgctggtagaagctctgcttgcgccaggcattgagcgccagttcgtagcggccatcaatcgcgccctggtagccggcgtagagccggtcgtcggtatcgcgcaccgccttcatcagggtgcgcatgcgcagcacccagcgctgcgccagcagcacgcctgcgcccagcaccgcggcaccgagcacgaacagctgccacgacagccagcccaggtacagcagcccgcccagcaccagcacgccgttgtagaacacgaacggcacgcggttgaaggccatgccgatcgaggcgatgtccttggtcagcgtggcatagacggtcgggccgccgatcgcttccaggcgctccacgtcggtatcgagcacgcgcttgagcatgcgcagccgcatgtcgtacaccacgcggtggcccagcgcggtcagcagcgcctgcgagccgaagccgcagccgaacagcaccgccagcaggcccagcagcacgccgatgcgccccgcttccagcgccgccggcgcggcgatcatgcggttgatctcggcaatcagcgcgatgccggcgagcgcgctgcaggtgcccgcggccagcgccaacagcaggaggccgccgaagcggcggcgcaatgagaggaacagattcacagggcctccagcaggtcgttcatgaaggccaggtcggcgtcggcatcgcgccggccggcctggtcgatcgccgcggccatgtcgcgcagcacgggcgcagcgaacagcgccggcagcgccagttcgcaggccatctgctcgcggatgcgggtctgcagccgcaccagcagcagcgaatggccacccagcaggaagaaatcgtcgtcggctccggcctgggccacgtccagcaccgcgcaccacagcgccgccagttcatgctcggtcggcgtcgatggtgccgccgccgcgcgcggcgcggccggctcgggcagcgcctggcggtcgaccttgccgttggcgttgagcggcagcgcatcgagccgcgtcaggctggacggcaccatgtagccgggcaactgctcgcgcaggcgcgcgaggatggcgtcgtccgagtcatcgccagccgtggcggccacgtagtacgcgcacagccgcgccatcccgtcgggaccctgccgggccacacagactgcctggctcacctgcgggcacgcgctcagcgccgcctcgacctcgcccggttcgacgcggaagccgcgcaccttgacctggtggtcgcgccggccgaggaactcgacaatgccgtcgacacgcttgcgcgccaggtcgccggtccggtacagccggtcgcccgccatggcgcccggcgtgccgggcgcgaacgggttgggcacgaaggccgcggcggttcgggccggatcctcggcatagccgcgcgccagcccggcgccgccgatgtagagctcgccggccacgcccgggggcaccggttcgagccgcgcgtccagcacgtagagctggttgttggcgatgggccggccgaccggcgcgaccgcccacgcgggagcgccctcggccgccagcgcatgcgccgcggaccagaccgtggtctcggtggggccatagacgttgcagacctgcgcgcccctggccagcagtgccgtggccagctcgcgccccagcgcctcgccgccgcacagcacgcgcagcccctcccatggcggcgaggcttgcgtcaccagcatctgccaggtcgcgggcgtggcctgcatcacggtgatgccgtgcgcggacatcagcgccgccagccgcgccgggtcgcgcgcatcgtcgcgcgtggcgatcaccacgcgggcgccgctggccagcggcaggaacagctccagccccgcgatatcaaagccgagcgtggtcaccgccagcagccggtcgctgccgtccatcggcaccaccggcgtcatcgcccgcaagaagttggcaaacgcgccgcgcgaaatctgcacgcccttgggcgtgccggtcgagccggaggtgtagagcgtgtaggccagttgtgccggatggcatggcgcagccggcggcgtatcgggggccgtgctccagggcggcgtgtcgccgtcgaccagcaccaccgcgccgctgtcgccgagcgcggcgcgtgtagcggcgctcgccaggatcaggcgcgcacgggcatggccgaggatgtgggcattgcgcgcggccggatggtgagcgtcgaccggcaggtaggcggcgcccgccttcaggatgccgagcagcactgccaccagcgcgggcgtgcgcggcaggcacacgccgaccagcgcctcggcgccgagttcctgcgcggccagccagttcgcgatgcggttggcggtcgcttccagcccggcataggtcaggctcgaggcgccgtccgtcaccgcaatggcatcgggcgtggccgcggcggcgcgcgcgatccgtgcgaccacgtcgtcggccgggtcgagtgcaaggccggtgtcgttgccgtcggccagcgtccgggcctgctcgccttcatccatcagcggcagtgcttcgagcggcgtctcgggcgcggccagcatcgcgccgagcaggtgttcatagtgccgcgccatccgctgggccgtggccgcggtgaacagcgtggcgtcgtattccagcgtggccgacacgcgcgtggcgctggcgtgcaggtcgagcgtgacgtcgaacttggcgctgtcgtcgggcaccggcagtgcgctcgcctgcaggccgggcagcgtgaaggcggcgggctcgcccatctgcaggttgaacatcgcctgaaacaccggcgtgcggctggggtcgcgcgacggcgccagcctgtcgaccagcagttcgaacggcaggtcggcgtggtccagcgcggcgcgcgcatcgtcgcggacctgctgacacagcgcgtggccgctcaggccgggcgtcagccgggcgcgatagacctgggtattgatgaagcagccgaccagttcgtccagctcttcatgcgtgcgggctgcgttgggcacgcccacggcaaagtcggactggccgctgtggcgcgccagcagcgcctgccatgcggccagcaacacggcgaacggcgtgagccggccaccccgacccgtgccaccagcgcagtagctgcgcagcgctgccaccacgtcgtccgacagcgtccagcggacgcgcccgcccttgcctgccggccgcgccgggcgcggggcatcgagcggcagttccagcgcgggaatgccaatgcccaggcggtccgcgcagcgtgccaccgcggcatcgagcgcagggccatcgagacgctcgcgctgccaggcagcgtagtcggcgtactgcaccggcagcggcgtccagcccggctcgctgccattgacggccgcggcataggcccgcgcgaggtcgcgcgccaggatcgggttggaccagccgtccgagacgatgtggtgcatggccagcaccagcacgtgggcgtcatcctccagccgggcgacggtgacgtggaaaggcgcggcggcgtgcaggtcgaatacgcgcgccgactcgcggcgcagctgcgcatcgagctcgcctgcgggcaggtcgatccattgcacggccggcggcgcgttgtcgacgatctgccggggctcgccgtcaccggtcgagaaacgggtacgcagtaccgcatggcgcgccgtcacctgcgccagcgcctgctccagcgccggagccgacagcgggccctgcaggcgccaggcgcgcaccaggttgtacgcggtgctgtccggcgcgtagcgctgcaggaaccacaggcgctgctgcgcgaacgacagcggcgcggggtcttgcgaggcgcgcgcacggatcgtcaggtcgggcataggctgcgtcattgggtctcctcgggagccgcgaggcagccattgctggcctggctgccaccgcgcgcatggccttgccgcgcgaacggcaaggccaggaccgccccgcagccgcggccatgctgcgactgactggcaagggggcgcccaggtgcgagattgtctttacaaagcgaattgcgaatatacctgataatcattctcattttcaacaaagaaaaggcgttgactgcatatccgcaacgccgtacggggctgcctcttgtttccgttaccgatcctgcttgcactgtttcccgagccgctgcgtcactacgccgaggccgtacgcatcggccccacgacgtccgatgacgtcatgcccgccgcgctcatgtccgcgccggcgggccgcgccccactacggcaggcgcttcacgccatggccgtccactacggtggcgacgatgcgcgcgtggccggctcggtctgggcgcggcattgcttctccgcgctgctgcctggcacggtggccgccgcggcgctggcgcaccacgtgctgcccttgcgcgacacggccatccggcccgatcggcacggccgcgccgtgacgttgctgctgccacacgctggccagaggtttgccggcgcgccgccgcagcagcgttacggcgccctgctggacgacctgctgtcaccgctgatcgaagcgctggcagcggccagcggcgcgtcgccgcgcctgctgtgggccaatgccggcgctgtcgtcgccgaggtattgcgccacgcgcccgccctgctgcagccggatatgccggccacggacgccacgctggcggccgacgcggcctggctgatggacacccgcacccgccccgacggccgcgacaacccgctgcatgcgccgatgcgcgcgcaccgcgtgacgcaggacggcaccaccaccacgctgtggctgcgccggctgtgttgcctgcgctaccgcttgccggccttcacgctgtgcggcgactgcccgcgccgcctgctgcggtaaagccgtcggcacctaggccgccagcgcgctggcgctgccgtgctccacgcgcaccggcacttcgcccagcgtggcgccggccagcgccggcagcgccagcaggatcgccacgcactgccgggtcagttcctccgccgcgctgtcgtcgagcgccgccgtgtcgtactccacgcgcagcgtcagcgtttcacgcggaatcacgatggccgttaccggatagctcatctgtccgcggttatcgacatcgctgaagcgcagcacgccgcgctgggtttcccgcaacgtgctgtcgactgggtagttctcgtagatcagcatggtgtcgaacggcgtgcgcgcggcatcgtcgctgccggccgcccagctctgcagccacgccggcggcgcatgctcgatctcgcgcagtgccaggttgtcggcctgcagcgccggcagccagtcggccacgcgcagcgagtcgggcagcgcctgcaccagcggcaaggtactcgcgagcaagcccatgatgtcttcgatgccgggcaactccgccgaacggcccgagcccaccacggccatccccaccgtgcgcgcaccggtggcctggcgcagcgccagcatccatgctgcctgcaccagcgtgttgacggtgacgtgctggcggctggcgaaagcggccagcgtgcgcagcgcatcggcctgcaccacgtgctccaccgcccggatctgctgcccgcgccgtgccggcgcgacctcgcacgtgatgcgcaccggttggcgtgccagcggcgccaggcgctcgcgccagcgttgttcaggatcggcgcccaactgcgcctgctgccacgccacgtagcggcgcagcgacaccgcgggctgggccggctgctcgccgtcgtagccgcgcagcacctcgcccagcaggcgcgacatgctccagccgtccagcagcaggtgatgccaggtccagaggaagcgccagctgtggtcgccgatgcgcaccagcgtcagccgcatcagcggcgcctggcccaggtcgaagccctcgcggaactcggcctcgcacagcgcctgccattgggcatcgtcgacggctgcggccgggcgatggctgcgctcgcgccagtcgtggtgcctgaccggcagcgtggcctgcgtgggcaccaccagcagcggctcggcctccatgcccgcgcccgcttgcagccacgccacccgggcccgcagcaccggatgccgccgcaccgcgtcctgccacgccgcgaccatgcgttccacgtcgagcccgtccatggtggcctgcacctgcacggtataggccggcgagccgggatgccgcgcgccgtgccggatcatgccgcgctgcatcggcgtgggccgccagatgtcctcgatctcgtcggcacgcagcgcgagcgcatccagttgctgctgcgacagcgcgctggccggcacatcggagggcgtcagccgcgtcacggcctgcgccacgcaatgcccgaccacctcgcgcagcgactgcgcgatgcgcgccatcagcgcttcgatggtggcctcgcggaactgcgcgccgctgtaggtgcagcggaactgcaggcggccgccctggatccggccgtcgaacgccagcggcgccggcaaggggatgttgtcggagacgccacggccggtatcctccgcggcggcctgccagctgccttcgccaaggctgccgtcgaactggccgaggtagttgaacaacacctgcggcgcgcacggcggcagcgccgcaggcgcgagagcgctgagcacgccgtaccccagcccttggcgcggcaccgcgcgcagcgcttccttgacgccggcgatggtgtcgccaacgtccgcaacgctcgccagccggaccggccagacgctggtgaaccagcccaccgtgcggctgagatcgagcgcgctgccggccgcctcggcttcgcggccgtggccttccatgtggatgcggatgtcgtcgcggccagcaaaggcgcacagcgcgcgcgcgaagcccgtcagcaacaggtcgttgacgccggtgcggtaggcggcatgggcacgccgcagcaaggcgtcagtcgtggccgcgtccaaagcaaagcttgccgtgcgggggcgcgccggttcaccgcccggaccatcgcatggcaatgacatctggtcgcgcgtgacggtgcgccagtattcggcctcgggcgcgaacatgtcgcgcgccggccctgccagcgtgcggctccatgcggcatagctggcgcccaccggcgccagcgctggcacctgtcccgccagccgggcggcgtaggcggcctgcaggtcttccagcacgatgcgccatgacacgccatccaccaccaggtgatggcagaccaggaacagccgctcgctgccatcggcgacgcgcaggtgcagcgcgcgcagcagcgggctgcgggcgatgtccagccggtcctgctccgcatcgcaggcagcggtgattgccgtggcgtccggcacgtcgatggtcgtcagtgcgaccgcggccccggcctcggcgacggcctgctgacgccagccttggtccgtgcgagtgaagcggtagcgcaacgcggcatggtggccggtgacgtcctgcagcgcggcctgcaatgccggtgcgtcgatggccgactgcgggcgcagcagcaccgactggttgaagcggttgcggctggcctcggccagcggctgcccgagaaaggccgcctgcaccggcgtcagcggcgccgcgccagcgtcatcgttggccgcatcctgcgccgtgccacccacgcgctccgccacccgcgccagcgcggccaccgtctggtgctcgaatacctggcgcggcgtcagccgccagccctgcaaacgggcgcgcgcgacgatctgcaggctcaggatggaatcgccgccgagcgagaagaagttgtcatgcaggcccacctgcgcgatgccgagcacgtctgcccacacggccgccagcatccgctccgccgcggacaccggcgcggcgtaggcggtctcggcctgccactgcggttccggcagcgcgcgccggtccagtttgccgttgggcgtgaccgggaggctgtcgagctgcaggatcgcggccggcaccatgtagtcgggcaaagccgccgcgagcgccgcgcgcagggcctcgcacgataccgcgccctgctgcgccacgacgtagccgaccagccgcgtgccggcggacgtctcgtgcggcagcaccaccacttgccgaacgccgggctgcgccaacaggcgcgcctcgatctcgcccagttcgatgcggaagccgcggatcttcacctggtggtcctgccggccgaggtattcgatgcagccgtcgggctgccagcgcaccaggtcgccggtgcggtagagccgtccaccgggcgcgccaaacggatcgggaataaagcggtctgccgtcatgccggcgcggcccaggtagccgcgcgccagcccttcgccgccgagatagagttcgcccggcacgcccaccggcaccggctccagccggctgtccagcacgtacgcgctgcgcgcccccaccggccggccgatcggcgcataggcgccggtgacctgggcttccgcgtcagcggcccttgccttccacaccagcggcgtcaccaccgtctcggtcgggccatagccgttgatgatgtgctgcggccgcagcgcctgcgtcaggcgggccacgcccgcccggggcatggcttcgccaccgaaggaatacagccacagcggcggcggatcgccctgcgactcggcccaggccgcgagctggtgcaggtagcgcggcggaaagcccgcgtgcgtgaccgcatggcggcgcagcgcggcgtaggtctgctccacgctccacagcgtgtcgtcacgcagcacgatgctggcgccgctggccagcggcaccatccagcgctcatgcgcgccgtcgaagctgaacgacaggaaatgcagctcgcggctggtggccgtgatgtcgtagcactcggcggtggtgaccacgtgcattgccagcgggccgtgcgccaccgcgacgcccttgggcttgccggtcgagcccgaggtgtagatgacgtaggcaagctgcgccgggtgcacggcaatttcggcatcgtgttcgggccaggatacgtcggcgtcgtcatcgaccagcagcaccggcaggccttctgccaccgggaaggactcgcgcagcgcgcgctcggtcagcagcagttgcggggcggcgtcctcctgcatgtccagcaggcgccgcgccggataggttgtatcgaagggcacgaagcagccgccagccttcagcaccgccagcagcgccacgatcatgcgcggcgaacggcccagcgccacgccgacacggctctcggcgccaataccctgcgcgaccagccggtgcgcgagccggttggcctggcggttcaactcgccgtagctgagcgtggcatcgccgaacagcacggccggggcctcgggcacgcggcgggcctggcccgccacctgcacatgcaccggcacgaacggcggtgccgcgcagccgggttcgctccagcgggccagcgcgtcgcgttcggcatcccccagcagcaccgctgcggcggacgtcgtggcgggatcggtagcgaacgcctgcagcaggcgcccatagtgccccgccatgcgcgccacggtggcggcatcgaacagatcggcggcataggcgatccgaccgaaaaggctgccatcgggcagctcggtggtggccaggctgagttcgaaacgcgcggtcgtcaccggcagttccagcgacgtaacgcgcagccccttcagctgcggcaccgccgcagcgccagcggcgcgatggtcgaaggtgacgttgaacagcgccggctgcgccaggctgcggccgggctgaagcgcttccaccagcaggtcgaacggcagcgcctggtgctcctggtccgccgctgcctgccgcgccaaccgcggcagcagctcggcaaacggctcgtctggcgccacctcggcgcgcatcacctgcatgttgacgaagcagccgaccagcgcctcggtctcgctgcgttgccggttggccaccggcacgccgatgcagatatcggcctgtccggtgtagcggttcagcaagaccgcataggcggccagcagcgccatgttgagcgtggcctgatgcgcgccggcaagcgtgcgcagcgccgcggccacgtcggccggaatgacgaaggtgtgctcggcgcccgcgccggtacgcgccgcgcggcgtggccggtcggccggcagatcgagtgcggcgccgggcgcatcgcccaggcgttcacgccagtagccgagctggcgctcggcttcgccggcgtccatccagttgcgctgccacgcggcaaagtcggcgtactgcaccggcagctgcggcagttcggccggcgtgccggcggcttcggccgcgtagcaggcggccagctcggcgaccaggcgcacgatcgaggcgccatcggcgacgatgtggtgcagcaccactaccagcacatgggaccggacgctctcgcggatcagcgcgacgcgccacagcggtcctgcggcgagatcgaacggcgcgtgggcaatgccgtcgatggtggtgtccaggccggcgggatcggcttccatctcgacgaatggcggcggcaggctgtcgtgcacctgctggcgcgccacgccggcagcgtcggttggataggtggtgcgcagcacctcatggcgcgcaccgatgcgatcgaacgcacggcgcagtgctgcggcgtcgagcgccccttcgagccggtatgcgcccggcatgtgataggcggtgccggccggatcgagctgctgcaggaaccacaggcgttgctgcgcgtacgacagcggcagcgcttcgctgcgcggcgcgggcacgatcggcagcgtggagaaggccacgcctttgtcgtgcagcgcggccaggaacgccgtgcgctgcgctggcgccagccgggcaaagcgcgcggcgacctgcgcgtgcgcggtattcagtgcatctgacatgggagcggtatcacggtcaatggatatcggggagcgctcaggcggccacggcagcctgcggcgccgcattcagcgcggtgagcgcgcgcgcgtcgagttcgcccgccgtctcgccgtgttcacgcacggccgcggccagcgcgtgggcagtcgggcggtcgaacaccacgcccggcgcgatctccacctgcaggcgccggcgcagccgcgccaccagcttgatcaccagcagcgaatggccgccgagcgcgaagaagtcggcgtgcgggtcgacccgctcctgctccagcagttcggccatcagcgcgcagaccagggtctccacggcatccgcggatgccgtggcagcttgcggcgccgctgcggcaatgtcgtccggcgatgcggccagcgtgcgcagcgccgtgcggtcggtcttgccgttcggcagccgcggcagcgcaggcagcgcgatcaagcgcgacgggaccatggcgtcgggcagcatggcggcaagcgcgcgccgcagcgcatccgtgtcggcggagccggccgatgccggcacgatgaacgcgcacagcacggctgcggcgccggggccgggcgcggcacagaccgcagcctgcgccaccgccggttgggccagcaacgcggcctcgacttccgccggctcgacgcggatgccgcggatcttgacctgctggtcggcgcggcccagcagttgcaggccggcgggggtggcgcgcgccaggtcgccggtgcggtagaggcgctgccctgccgcgaacgggtcgtcgacaaacgcggcggcgtccaggtccggccggccgaggtagccatgcgccagttgcggaccgccgacgtagagctgcccggccacgccggccgggaccgggcgcaaggcatcgtccagcagccgcacgcgcgtcgcgcccagggcccggctgagcggcgccgtgccggcgggccacgccggatcctccgcgccgaccgcgtggaccatgacgccgatggtggtttcggtcgggccgtagtggttaaagatccggcagtccggcgcgtggcggcgcagcccctgcaccaggctggcgggcaagggctcgccgcccaggatcacggtggcgggcacggccggtgcatccgtttccagcagcgccgccagatgcgacggcacgatcttgatagcgtcgacctcgcgtccacgcaggtaacgagcgaaggcggcgggatgcgccatgtcgtcatcgctggccaccgtcaggcacgcgccctgccacagtgctgcgaacagcgtggtgttgccaaggtcggccgcgaccgacgacgtcaggccgagccgccggcacgacgccagcgacagcgcctcgcacaccgccgcggtgtaatggctgatctgccggtggccgaccaccacgcccttgggctcgccggtggagccggaggtgaagagcacgtaggcggcgtcttcctgtgcgctggcaaattcgccatcaacctgtgcggccttggccagcagcgcatcggcacggatcaccgtggcgttatcgtgggcagcctgctgcgcgatggtcagcaccggcgccgactgcgccagcacgctgcggcggcgcgcctgcggccacgccgggtcgagcggcacataggccccgcccgcggcccataccgccagcaggctcgccaccagcgcgccgctgcgcggcagcgccagcgccacgcgcgtgccagggccgacgccaagcgcgcgcagccgttgcgcggcgtcttgcacggtgcgctgcaggccggcgtagtcgagcaccaggtccgcggcatcgagcgcgggtgcatccggtgtctgccgggcatgctgcgcgatgcgtgcgagcagggtctgccccgcatccacgggcgtttcgcccgtccagcactgcggcacgcgcaaggtatcgttggcaggccatgacagcgattccagcggcgtgtcgagcgccgcaggcaaagtgccgatcagtgccgccagatgcgccagcacccactgcgcgacgcgcggatgcaggacgcctgcgcgcgcatgcagcgcgagcgccgccatgccctgcccgtcatcgagtgcctcgcacaccaggtcgaagccggcccatgccgggctggccatcgccacgccggcgggcggcagcggtgctaccgcaaacccgatacggggcgcggcctccccgggctgccaggcttcctgccacgcggcgtggctgtcgagcgcgggcagccaggcgcgccagtgctcggccacgctgcgctgcgcgtcccaagccacgctgaccggcagcgccttgacgaatacgccggcggcatcggccatcacgtcgtagtcgcggcggcaatcatgcagccaggcaccgctgaacaccggctgcgcgcacaggcgcgccagcacggtccaccaggccgcctgcaccacgcgctcgggcgtggtgccgaactgtcgtgccgatgcggccagcgcctgccggtgcgcgccatgcagcgtgtggcgccaggtgtcgctaccttgcgcggcggcgcttcctgccagcgcatcggggatgcgcagcggggccggcaggccggcggcctgcgcctgccagtacgcgcggccggcgctgccggtgccgtcttcgcccaggcgcgcgccttgctgccagtcggcgtattgcgcgtattgcagcggcaattcctcatcgccatcgatccgtgccggcgcatccaatgcatcgcgcatgttttcggcaagcttcagcacggtgccgcggtcagccgccagcggactaaccagcagccacagggtggcgccgcccgcgggcagagggctgatgcaggcgcgcagtacgtcgccggtggccgggtcgagcgcaggcagcgacggcgcatcgccgggcgcggcgatggccgtggcggcaccgttggtgcccgcctgcggcacgcaggccaccagctcgttgccattgtcaatatatgcggtacgcagcgattcgtgccgcacacgcagcgcccccagcgcggcatccactgcggcagggtcggactgcccgtgcagagcgatccgcgccacatgcgcgcgcggccccggcgtgtcgcaccattgctgccatgcggcctgttgttcgggtgtcggggtccaggcggactgcagctcaggcatcggcgttctcctgcggcaccgcggcggcattgccgtcgggctgggtgcggtcaaacatatcgcccatcgcgacgacgatcttgcgcgggccttcataggggtcgcgggcgtgcgcggccagcatgttgtcgagcatcaccacgtcgccgcgctgccagtcgaagcgcacggcgcaggcctcgtacagttcgcctatcagcttcatcgcctcgtcgggaatcggcgtgccgtcgccgaacatcacatggcgcggcatgcgttccagccccaccatctcgagcaggtcttcacgcacgtcttcctccaggcacgacacgtggtgcagctgcacctggttgaagaagctgcgctcgccggtgaccgggtggctgacgatggccgggcacaccgtgcgggtctgcaggatgtcgccgtccagccagcggcagtcgatgccggcggcgcggcagcgcgcttccacttcagcgcggtcctcggtcttgtagaagtcgcgccagtccacgtccagccgtggcgtgaaggtgcgcacatacatgagctgccggctggcgaactcggcggccagcgcgggcggcaggcggcgcagcagttcgcggcagtcgacgatgggggtggcgccgccgatggcggaaggcagctcgcaatagaaccactgcttgcgcggccagcgctccaggtgcgcgctttcgttgtggtacaggatcatctggcgttcggggtacggcgtggagcggtaggtgttgcggccgccctccttcttgggcaggtcgccgtagctgccgtacaggccgggatgcatcgcttcggcaaaggcctcgaaggcctgcggcgtggggaggtcgaagccgcggaagacgatgcccgcgtgtttatgcagggtgtcggcgatcagcccgcgcgcccgggcggcccaggcgacgggatccaggccgggcgccgccggctcgatcacgatgggaaagacctcaccggcccgcagcgggcgcagccgcacctggctggccgggtcggcggcggacggaaccggagtggcgggagcgagggtggccgggcgcggccgcgccagcgatttgagctggtcgagcttggccgccatgcgttggctggtttccatgtttcgggactcctcgggtttcggttgggtcgggcgcgcggcgcccgggacaagttcggtgacgtggtcgacgggctggtccggcgcgtgcagcagcgcgtccagcgtggccagccactcgctggcaaagcgcgccaccgtggtccgctcgaacaacgctgtggcgaacacccagtcgccgcgcagcgctgcggctccctgcccgccctcgggctcgaggaacagcgccatgtcgaacttggaattgcgctccactggcggcagcatgtcggcctgcacgccgggcatggcgagctgcccggccggcgtgttctgcagcacgaacagcgcctgcaccagcgggttgcggctgcggtcgcgcggtacgccggcggcttcgacgatgcggtcgaacggcaggccgtcatgctcgaacgcggccagcacgccgcgccggcaggcggccagcgtgtcgcggaagctggcgccggcgacgcgccgggagcgcagcggcagcacgttgacgaagaagccgatcaggggctccagcgccgcctcgtggcggccggcaacatcggtgccgagcaccaggtcgtccatgccggtgacacggtgcagccagcactggaagctggccaacagcacgacgaagggcgtgacctgctcggcgcgggccagcgcatgcacttgtgccatgcgcgcggcatcgatatgcagcggcacggcatcgccttccatgcgcgccaccggcgggcgggcgcggtcggccggcaaggccagcgccgccggcgcgccggcgagcgcgccgcgccagtaggcggtcagccggtcgagcgcggcgccgcgcagccagtcgcgttgccaggcggcgtagtcggcgtattgcagggccagcggcggcagcggtgtgacctggtccggcgccagtgcgcggcggtagccatgggtgatctcgtcgaccagcagcccgaccgaccagccgtcggacaccaggtggtgcatcgcgaccagcagcacgtgttcctgcggggcgcagcgcagcagcgtggcgcgccacagcggcgcctggtcgagcgcgaagggccgtgacgcgtgttcacgcatggcttcgcgcagcgccgcgtcgcgggtctcgggcgcgagtgcctggaggtcggccaccggcaggtcgatgcctgcggcagcaccgatgctggcgaacggttcgccgtcgtcgtcgggataggcggtgcgcaggacctcgtggcgagcggccacggcggccagggcctggcgcagcgcagcgacatccagcggcccgcgcaggcgcagcgcgccggccatgttgtaggcggcaccggcattgccctgcaggcgctcgaccagccacagccgttgctgcgccagtgataccggcatgcgtgcaacgcgaggcacgggcaccagcgccgggatcgccgccgcgggcgccgccgtggccaggcgcgcggcaaagtcgcgcagcaccggggcttcgaacacatcgcgcagcgcggcctgtgcgtggccggcggcacgcaagcgcgcgaccacgcgggtggcgatcagcgaatggccgccgaggcggaagaaatggctgtcgcggccaacgcgcacgccgggcagcagtgcctcccagatttccgccacggcttgctcgaccgggttggccgggggatcgccctcctcgccggcggctgccacctgcggcgcgggcagcgccttgcggtcgatcttgccgttggcgttgagcggccaggccggcatgcgcacccacgcggccggcaccatgtaggccggcagccgcgccgcgacgctggcggcgagctcggcttccagcacggcctggccggctcctggctgccagtaggccgtcagccattcgctgccggcggcctggtacaccgtcaccagcgcctggcgcacggcgggatgcgcggccagcacggcctcgatctcgcccagctcgatgcggtagccgcgcagcttgacctggaagtccttgcggcccacgtattccagcacgccgccggcctgccagcggccgaggtcgccggtcaggtagcggcggctgcccggggcgccggtcggatcgggcacgaaggcggccgcggtgcggcgcgggtcggccaggtagccccggcccacgccagcgccggccaccgcgacctcgccgatcacgccgggtgcggccaggttgccgtcggcatcgagcacctgcagcacggcattggcggtgggacggccgatcggcacggtgtcgctgccctgccccaggctatcggcagacaaggggtggaaggccacgtcgtccgagcattccgcgggcccgtaggcattcatcagcggcaccgccggatagcgcccgaaccacgcgcgcgcggtcgcgggcggcagcgcctcgccggtgggcagcacccagcgcagcgccggcagcggcgcgtcgcggccctccgcggcctggcagtccagcacagcttgcagcagcgacggcaccggttcgaacagcgtgacgccgcgctgcgcgagcagcgccgtcagcgcggacggatcgcgcaccacgtcgtcggcgacgacctccacgcgggcgccgaacagcggcgcggcgagcgcctgccataccgagatgtcgaagcacggcggcgcggtctgggcgatcacgtcgccctcgcccagcccgagcggcaccaccttggccagcatgttgttgagcatgccggcgcgcgtgaccatcgcgcccttgggtacgccggtcgagccggaggtgaacagcacgtaggcgagctgggcggggtgcgaggatgtgtgcagtgccgtcgttcccgcggcggaggcctctacggctgccagcgtccgggcgcctgcgatccctgcctcggcgagcgcggcggcgcctgcagcatcggtcagcacctgcgcggggcgcgcctgtgccagcacctgttgccagcgtgccgggggatggctgacgtcaagcggcacccaggccgcgcctgcgcgcagtattccggccagcgcgaccagccagtcgagcccgcgcggcagcagcactgcgacgacgtcatcctgcgccacgcccgcggaacgcaggcccccggcgagccggccggcacgttgccaccagtcgccataggtcagtgcggcatcgccgcagcgcgccagcacgcgctccggatgcgcggcgacgcggcacgccacgcgctgtacgtagtcgtcgtgcagggctgcctgcgagacgctggtgtcatcgctggcgccccaagcctgcagccgcgtgtgcgtggcggggtcaagcagatcgacggcaccgacatgcgccgcgccctcggccagcgatgccagcgcggccgcgtacgcgtccatccattgcgcgaggcgtcccgcctcaactcggccggcatcgcaggtgaagcggacggtgaagcgacgatcgggcatcacttccagcgtcaggccgtagtgggtctgctcgatgttgtcgtgctggcgcaggcgcaggcacgccacctcgcgcgcccggtcgttcaggtcgggcaggttctggaacaccatcagcgtgtcgaacagcgcgccaccggcaccggcctgcgcctggatctcggccagcgcggcatgttcgaactcgcgcatggcgacgccggcttgctgggtagcctgcagatagtccgtcaccgccagcgggccgcgcggacgcagacgcagcggcagtgtgttgataaacacgcccagcatgcgctcggcgccgtcgaggcccgggggccggccggccgaggtcacgccgaagacgatatcgtcgctgccgcaatggcgcgccagtacgatgccccacgccgcctgcatcacagtgttgagggtgacgcgatgcgcggcggccagcgcgcgcaggctggaatcgagtccggccggcagcaccaggtcgcggcacagcggcgccgcgctgtggttcgcggccgccggcgcgatgcccggcagcacggtgggaccgggcaggccggcgaaggcctcgcgccagaaggcctgccgcgccgtcgcgggttgcgcggcgagccaggcgatatagtcgcgatacggccggcgcggcgccggcgcgtgggccggatcggcgtagcgggccagcgcctcgtcgagcagttgcaccgagccccagccgtcgacgatcaggtggtgccggctccagaccagccaccatccctgctcgccggtgcgcagcagtgccagccgcatcagcggcagcgcagccgggtcgaaaccacgcgcgcggtcggcgcggcaccaggctgccagacgctcggccagcgccgggccgtcttcgccgcgccagtcctcgacggccacgggcagcgtggcgcgggcatgcacgcattgcagcgcgcggtcgccgcaaccggcttcgcccggcgcgataaaggtggtgcgcaggatcgggtgggcgtcgagcagcgcctgccacgcggcggccatccgcgccgggtcgagcggcccgtcgatttccagcaccagttggttgacataggcgccgttgccgccgtcgcgcaggtggtggaacagcagcccttcctgcagcggcgacagcggataggcatcctcgatgccgccctgcgcggcgcgcaggcgctccagtgctgccgcgtcgcgaccgctcagcgcaaatggctgtgccacggccggcgtcgcagcgggagcggcggcaggttgtgcgcgcgcggcgagatgcgccgacaggcgcgccagcgtcgggtgcgcgaacaggtccctgggcgccagcatcagctgctgcgcgcgggccttggccacgatctgcagcgccaggatggaatcgccgccgagcgcaaagaagtcggcgtcgcggtcgatctcgtcgcgctgcaggatctcgcgccagagggtgcgcagcgtctgctcgatggcagcggttgcgtcggccggtgcggcgcccgcgcgcagtgcggcggccaatgccgagggcgtgggatgggcgaacagcagcttgggggtcagcgccagaccggcctggcgcgcttgcgcgaccagctgcagcccgaggatggagtcgccgccgaaggcgaagaagttgtcgtcggcgctgacggcatcgcgcccgagcacgctcgcccacaggcgcgccagcgtagcctcggtgtcatcctgcggtgtagcgcggacgggcgcggcgacctcatcgggcaccggcggcaaggccttgcgatcgaccttgccattgcgcagtcgcgcgaaggcgtcgcactgcacgaaggccgccggcagcatcggcgccggcagtgcggcagccatggcggtgcgcagcgcggtcaggtcgaagccgtcggcgggcacgagataggcgaccagccgcaggccttcgcctgcgggcgagggctgcgccagcaccaccgcatcacgcacgtgcggcgcctggcgcagccaggcttcgacttcgccgggttcgacgcggaagccgcggatcttgacctgggcatcggcacggccgaggaagacgatggcgccgtcatcagtcatgcgcacgcggtcgccggtgcggtacaggcggccgccgggctggaagggatccggcacgaagcgttcggcgctcagcgccgggcgccgcaggtagccgctcgcgacgccggccccgccgacgtagagctcgcctgccgcgccgcgcggcacgggattcaggtgccgatccagcacgtaggcgctgacgccgggcagcgggcggccgaccggaatcgcaccctgcgctccgcccgatggcaccgggtgcgtcaggcagccaaccgtggtttcggtgggcccgtagtggttgaccacgcggcaggccggatgcagcgcctgcacgcgcgccaccagcgccgcatccagcgcctcgccgccgaacaccaggcattgccgcggcaccaaccgcgccggatcggcgacggccagcagtgcgcgcaggtgcgagggcacgatcttcaggcaatcgaccggccgcgccgccagcgcgctggcgagggcctcggggtcttcgcccagcccatcgtccagcacgcgcagcgtgtggccgcccagcagcgcgccgaaccaggcggtgtgacccaggtccgctgtcacggaggacagcgacgccatcgacgatcccgccggcagggccagcgcgtgcagcacgccagcggcgtagtgcgcaaggttgccttgcgtcaccaccactgccttgggcgtgccggtcgagccggaggtgtagatcaggtaggccggctgggcgggcacggcagcgggccatgtcgccgggagaattgcggcatctgctcgcagggatacggcatgccagccggcatcgggcaacacgtccgccagccactgcggctgccccccctcgcccactaccgctttcaggtccgcatctgccgccagttgtgccagccgcgcggcgggcatggctgcgtcgaggcacaggaacgcggcgcccgctttccacgaggcgagcatggccacggccatgccggcgcctcgcggcagcagcaggccgaccacgtcgccggggcgcacgccaccttgctgcaatcgcgaggcaagcgcgtcagcgccggcgtcgagcgcaccgtaggacaactgcgcatcggcagcgtctaccgcgaggcgctccggatgcgcgcgcacgccggcctcgaaggccgccagcgctgtggcgtggacctgcgttgcggcaccactggcctgcgcatgcgaaagcaccgccgcatcgaacaaggacagatcaccgacacgcacttcggcgttgtcgagcaccacgtccaccgcaacccgcagcgccgcgatcagccgcagcactgcctccggggcaaagcggtcagcgtcgtagcgccactggccgcgcaggcgttcgccttcgtcctgccagcgcaggttcatgtcgttggccgcgccgcgctgcgtggccaggtattcgcgcaccaggtagcggcccagcaccttgcgcggacccaccggcacgaaggtcgtcatatgccggaacaagggccccaggctgcgatccgcgccgcccatgcgcgccatcggatattgctggtggcgcaaggcgccgcgcatctggcgggcgcagtcgcgcaccaccgtggcaaaggccgggttggcggagaaatccgcgcgcagcggcacggcgttgagcgtatagccgatcaggtcggcatgctgcgcgccggagcgtccggccgtgggcgtgccgacgaggaagtcgtcctcgccgctggcccggtgcagcacggtcttgaacagcgccagcatcaccacgaagacgctgacctcgagccgcgcggccaggtcgcgcaggccctgcgtctgttgcgccgtcaggtggaattcaatctcggcgccgcgcaggcggggctcgacagcgcgctcgccggccagggccggcgccgcgggcgcgtcctcgagtacgctgtcccagaaggcgcgcagcgatgcaccacgcggccccgccagcaactggcgctggcgcaccagccagtcgcggtagcggcccacctgcgacgccatcggcggactggccgggtccttggcacgcagcgcttcgtaggtcgcaaggatctggtcgcaaaccgtctcgaagccgagatagtcgccggcgatatggtgcatgccggcacacatccacatgcgctcggtgccgtcggcctggcgcgagaccaggaagcggaagcggcagacctggcccgcgtcggggtcgaacggctcgtccgcttcgcgctcgaaccaggccatcagatcggcctcggcaaggccgtcgacgcgcgtcagcgaaacctcggctgcaaagccggccggccgcgccatcacgatctcgccgtcctcgtccaggtaggcgctgtgcagcgcctcgtggcaatccaccacatggcgcgcggcctgctccagcaggtcgaagcgcaggcccggcgccagctcgatcgtgaacaccatgttgtacgcggcgctgtgcggatggcggcgatggaaggccagcagcgccagctggccgggcccggcgggatagcggtcgaaatagccgggatgcgcggccagccaggcatcggcctcggcggcgcgcgtggcgagcagcgcagccgcggcgtccagcgcctcagcgctggcggcgcagtcatcggccacgcgccagcgcccgtccagcaggcgcaggcgcacgccatcggcgcgcagagttcgcatcagggcgccggtttctgccggcagggaagctacggaagacgacatggcgaaaacgttggagatgacaaggccctggcccgcagggcggccagtgggcatcgggacggcggcgggatcagcccaggccgggcggcgcggactcggccatggcgacgatcacgcggcgcgggccgctgaaggtgccgcgcccgtgggcggccagcatgttgtcgagcatcagcacatcgccctgctgccaggggaagcgcacggtgcagtcgtcgagggtggcgcggatggtggcaagggcgtcgtcctccagcggcgcgccgtcgccgtagacgacattgcgcggcagttcgtcgacgctgccgaccacggcgagcagggcctcgcgcacgtggggcgcgagccccgagacatggaacaggtgggcctggttgaaccacaccatctcgccggccaccggatgccgcgcgacggcctggcatagctggcgcgtgcgcagctcgccgtcggccttccattcgaaatcgatccgctgggcgcggcagaagcgctccacctgcgcgcggtcatcggtgttgaaggcgcgttgccagctcaggtcgaggccgttgccgtagttgcgcacgtacatcaggcggcgcgcggcaaagcgctcgcggatgaccgggtccaggcgctggtagaccagccggctgtcggcgatgggcgtctcgcctcccgtctcgctcggctgcacgcaatggaaccagatcttcatcggccattgcagcgtgtacgactgctcgttatgcagcgggatgacctggtgcgccgggtattcggtggaggtatagacgccctccttcacctgcgagcgcggcgtcgagccgaactcatagctcagcagcggatggccgaaggcgctggcgaaggcgcggaaatccgaatcgtcgtcaaagcggaagccgcggaacagcacgccgccgacgcgcggcaactgctccgtggcgatcgcggccatggcgccgaactggcggcgccagtcggtatcgccgtcgggcgtgaccaccagcggcagcgcgctgtgcgcaaacatcggcgcggtgcgcagcgcgcccgccccggttgtcgctgcggtggcagccgcgccggagccggcgcgatggtccgcatggaggtcggcgatggtagcggtcgtgtccaaatccatatccctgttccctcgctgggttcgttcgcgcttgccgcacggcgccggaagaggcgttgcagcggggcctgaggcgggaggggcgcggccacgcgaacaatgtctgcacattgcatggaaggcgagtctaccggaaatatttacgaatggaaatacaaatcattatcatttacgatgtagccttcgacgtttttgttgtcttcaacgttttccttgccggcgcggcaccgactgcgacggcaactcaaaccacctgaaggagcacagccatgagctgggatcatcccgacacgcgtttccacgtcgtccgcaacgatgaaggccagtattcgatctggcccgactacaagcccgtaccggcaggatgggccagcgtgggcttccagggcagccgcgacgagtgcctggcgcatatcgagacggtctggaccgatatgcgtccgctgagcctgcagcgcgcgctggccggcgcatgagccccgcgcagccgatgcgcgatccctggtacgccgtgatgccgggccgcagcgggccggctgccggcgatcgcgtgcgcctgtactgcctgccctatgccggcgccggccataccgcgtaccacggctggcgcgccgcgctgcctgccgcgatcgagctggcgccggtatgcctgcccggacgcggcacgcgcactgccgaaccgcatggcgcatcgatccatgcgctggccagcgcgctggccgcctcgatcgcgcgcgcggcccgagccgaagcgccgcgctttgcgctgttcggccacagcatgggtgcgctgctggggttcgagaccgcgcgcgcgcttgaaaccgtgcatggcctctcccccgccgcgctggtggtgtccgggcgcggcgcgcccgcgctgccgtcggctcggccgccgttcagcagcctgccggacggcgcctttgccgacgtcatcgccgccatgggcggcatgccggccgagatccgcgaaacgccggaagcgctcgccttcttcctgcccgtgctgcgcgcggatatcgcgttgtgcgaggcctggcgctaccgtccgggcccgcggctgggctgtccggtcacagtgctcggcggcagggacgacgtccacgccccgcccgcgatgctggccgcgtggcgcgacgagaccctgcacgactgcagccaccggctgttcgcgggcgggcatttcttcctgcacgaggcggcgcaggacgtgctggacaccatcacggatgccgtgctcggttccacgatgcgcgccaccagagaccacggccatgcgctcgcctgacatggccgcgccagcgcacggcgagatccaggtctggcacgtggcagtcgacgctgcggcagacctgtcggcgctgtcggcaagcgaacgcgcgcgcgccgccatgttccggcaacccggcgaccgcgcccgcttcaccgcggcccgctcggcattgcggacactgctgggcctatacctgggcgtgtcgcccgacgccgtgccgctggtcgccaacgcgttcggcaaacccacgcttggcggccattgcaccacagccctgcagttcaacgtcagccacagcgacgcacgcgccgcaatcgcattgtcatgcgcgccggtcgggatcgacatcgaagcctggcgtgcggacatgacgtggacagcctggcacgacagcgcggccgtggcctgcaaccccgacgaaatgcgctggctgagcgcgctggcgcagcgccaaccgcaggatgccatgctcgccttcctgcgcctgtggactgccaaggaagcgtgcagcaaggccgtcggcacagggctgtcggctgcgccgcaatcggtgcgcgtggcgctgccggcgtgcgctgcctgcgtgccgccgctggcgcgcgccggggccgacctgcgcgtctggcatatccacgatgcatgtggccagcccgatcacgacacccgctacgtcgcgagcctggccacgccactggccgccgcgcgcgtcgtgcaccggcagtatccgccgcgcgagctgcccccgcgcgcgggccaacccatcttgcccggtctcgatgccgggccccgcagtcaacgtccctgttcaacgcccccgttaggaacgacaccatgacgcctccctcgctcgccacgcatgcccacggccaacccgcgccgttctcggctggcgccttcgtccggcaagcgcccatccggctcgacgacaacccctacctgcagcgccagtccgcgcgcgagtccaacgcccgctcctatccgcgccgcatcccgctggcgctggaacagggctatggcgtgtatttgcgcgataccagcggccagctcttcatcgactgcctggccggcgccggcacgctggcgctcggccacaaccacccggcagtagtgcgcgcgctgcgcgacacgctcgacagcggcctgccgctgcatacgctggacctggccacgccggtcaaggaccgctttatcgacgacctgttcggcctgctgccgcccgagttcgcagcgcgcgcccgtatccagttctgcggcccgaccggcgccgacggcatcgaggcagcgctcaagctggccaagaccgccaccggacgccatacggtgctgagctttgccggcggctaccacggcatgacgcacggcacgctggcgctgatgggcaacctcggccccaaggcgccgctgggtgcgctcggcggcagcgtgcagttcctgccctacccgtatgactaccgctgcccgttcggcctgcgcggcgacgccggcatcgacgcgggcctgcgctatatcgagcagatgctggccgacccggagtccggcgtgctgccgccggcggcggtggtggtggaagcggtacagggcgaaggcggcgtgatccccgcgcccgcgcgctggctgcgcgaactgcgccgcatcacgcgcgagtacggcatcgcgctggtgctcgacgaagtgcagaccgggctcggccgcaccgggcgcatgttcgcgttcgagcatgccggcatcgtgccggacgtgctggtcctgtccaaggcgatcggcggcagcttgccgatgtcggtggtgatctacgacagcgcgctcgacgcgtggcaaccgggcgcgcacgccggcaccttccgcggcaaccagctggcgatggcggcgggctccgccaccatccgcaccctggtcgcgcaaggcatcgtcgcccatgccgagaccatgggccagcgcctcgccacgcggctgcggcagttgcataccgcgtgccccgcgatcggcgaagtgcgcgggcgcggcctgatgatcggggtggaactgatcgacgaacgtgccgaggccgatgcggtgggcgcctacccggccgacggcaccttcgcgcgcacggtgcaacgcgaatgcctgcagcgcgggctgatcgtcgaactgggcggacgccacggcgccacggtgcgcttcctgccaccgctggtcatcggcgagaccgagatcgacctggtggccgagttgtttggcgacgcagtcagcgcggcgcacaagcaatgccgctgagcgcttgcgcgccgttccgcggtggccggggccaccgcggaaccagcttcaggacgcgtcaccgcgcagcatctcgcgcagccggaatttctggatcttcccggcgggcgtggccggcaaggcgtcccgcaccacgagcttctcggggatgtactgcagcgccattttctgcgccttgagccagtccaccatcgccgcctggtcgaacggctggccggcgcgcggtaccacgaaggcgcaggcgcgctcgcccaggcgctcgtcgggataggcgacgatggccacctgggagaccgcgggatggcggtacagcagggtctcgacctccagcacggggatgttctcgccgccgcggatgatcacgtccttgctgcgcccggcgatgcgcaggtagccgctggcatccagccgtgcgaggtcgccggtgtcgaaccagccgtcggcatcggtgccgttgagctgcgggcgcttcaggtagccaccgaagttggaacaggcgcgcaccagcaggcggccggtttcgccgggcggcacgtcggcgtcggtgccgtccacgatgcgtatttcgacgcctggcagcgggcagccgtcggtggtcgaggcgcgctcgtcgctgtcatccggcagcgtggtggtaaccgcaccgttctccgtcatgccccaggccgatacgatcttcgcgccgagcgcctcgcgggcgcgctcgaccagcgcgccgggaatcggcgcaccggcgcacaggaagatgcgcaggctgggaaccggcgtgccggactccgccaccacacgcgccagatcggtcaggaacggcgtcgaacccatggtgaaggtcacgccctcctcgcggatcagcgcggccgcgcgcgccgggtcccagatgtcttgcagcacagcatgcgcccccagcaacaccggcatcagcagtccatacatgaagccggtctggtgcgccatcggcgacgccatcagcaccacatcgtcgctggtcaggcgcagccgttcggcgtaggcgacgatgttggagaacagcgtgttggcgctatgcatcacgcccttgggctcgccggtggtgccggaggtgtagatcagctgcgtgacgtcgtccgggccgggacagctgcgcagcaggatgttggcggcatcgggctcatattcccaggcgggaccgctaagcagtgcttcaaagctgtccgcgccatcaccgccggcaacaacgatgtggcgcagcgccggcaatgcctcgcgcaaaccctgcagcatctgggcatggccgaagccgcggaacagctgcggcaccaccgccaccttgcattgcgcatgcgccagcatgaacgacagctcgcgctcgcggaagatcggcatcagcgggttgagcaccgcgcccagccgcgagcaggcgagatacagcacagtcaggtgccagccgttcgggagctggcatgacaccacatcctgcgcgccgatgccgaggcggctgagacccatcgctacccggtccgccatccgggccagttcgcgccaggtgaagcgtgtcatgctgccgctgtcgaggctcagcgccgtcagcgctggggcgtcgggccggtcgcgcacgcaggcggccaggtagtcgttgacggtgcggtcatgccaatgcctggcggcaatgctggcggcacggcgcggcgcgatcagtacggcgtcgaaatccatgggtgtctcctctttatcggacggctcggcggtcgtggcgccgcttcaggccggtacggcttcgcgccccgcgcgcgtgcgggcaatgatggtcttcatgatctgtgccgtgccgtcgccgatctggaagcccagcacatcgcgcaggcgctgctccatcacgccgcggtcataaccaccgtggccgaacgacagcaggcactggtgcaccacgtcgtacgccagcctgggcgcccaccacttgcacatcgccgcctcggcggtatgcggcaggccacggtccttgagccacagcgtctgcaggcacagcaggcgcgcaccctgcacctgggtctcgaaatcggccagcggatgcgacacgccctggaaggccgacagcggcttgccgaaggcctggcgctcggccacgtaggcccaggtctcgtccagcgcggcctgcgccaccgccagcacctgcaggccgatcagcgcgcgcgagaagtcgaagccctgcatcacctgcacgaacccctccccctccttgccgagcaggtggctggccggcacgcgcacgttctcgaagaagatcgagccgcgcccgatggcgcgctggccgtggcagtcgaagcggttgcgcgtgatgcccggcaggtccatcggcaccagcagcgcagacacgccgcgcgcgccggactcgacggtgccgctgcgggcaaagaccaccgcggcatcggcctggtcggcggcggagatcgaggtcttctcgccgttgagcacgtagacgtcgccatcgcgctccatgcgcaggcgcaggctggccgcgtcggagccgccgcgcggctcggtcagcgcgattgccagcagcgcctcgccgcgcgtcaggcgctgcagccacggtccggcgatttccggctgtgcatggtgcgccaggatctggccattgagcgacgcgagcaagttgatgtacgacaggctcaggtcggcacgcgccacggcttcatggatcacgccggcggccaatgagcccatgccctgcccgccatactgctccggcagttcgggcgcgataaagcccatctcgcccatttcgcgcatcagcgcgcggtccagcacgcgggtgcggtcgcgctccaggtagccgggcgccacgcgcgcatcggcaaagcggcgcgcgtgctcggccagcgccgtcaggtcttcgtcaagatagggattcatggtggtctccgctggttcggacggcacggcttacttcgcgtacttgcggaactcgggcttgcgcttttcctggaaagcgcgcacgccttcgcgcgattcctcggtgtcgtaatagagcttgagcgcgtacatgcccatgccggcgatgccgctctggtgcgcggtatcgagattgaaggagcgcttggcaatggcgatcgcggtgggactcttctccatgatctcgtcgcaccacttctgtacctcggcatcgagctgctcgtgcggcaccaccgcattgaccagccccattgccagcgcttccgcggccggatagcggcggcacaggtaccagatctcgcgcgccttcttctcgcccaccacgcgcgccaggaaggcggtgccgtagcccgggtcgaccgaaccgaccttgggcccgacctgcccgaatacggccttgtccgacgcgatggtgaaatcgcagatcgtgcacagcacgttgccgccgcccacggcatagccctgcacgcgcgcgatcaccggcttgggcacgtcgcggatggcgttgtgcagttcttccatcggcaggccgatggtgccgcggccgtcgtactggccctcgtgcgcggactggtcgccgccggtgcagaaggccttttcgccggcaccggccagcacgatggcgccgatctcgcggtcatagccggcgcggttgatggcgtggatcagttcgtcgcaggtgcgcccgcggaaggcgttcatcttttccgggcggttgatgaggatccaggcggcgccgttgcgcacttcgtacaggatgtcttcgtattgcatggtggtctccgttttctggtgtttgcttgctcagccgttcatggtcaggccgcccgacacgctcagcacctggccggtgataaagccggcgtcgtcgctggcaaagaacagcactgcgccgggcaggtcgtcgggctggccgatgcggcccagcgggatcgagcgggtaaaggcttccaccagcttctcggggttgcccgcaccctgcttgtagtcttcgaacagcgcggtctcggtcggccctgggcacaccacgttgacggtgatgccgtggcgcgcatgttcgcgggcaatcgtcttggagaacgacaccaacccacccttgcatgcggcatagaccgcctcgccggacgaatccacgcgcgccgcgtccgaggcaatgctgacgatgcgtccgcgccggcgcgcgaccatgcccggcagcaccgcgtggtgcatgtgcagcgcgccgatcaggttgatggcgatcagccgatcccattgcgcgggctcggtcttgatgaatggcttgaacacatcccagccggcgttgttgaccagcacgtccaccgggcccaggccctgctccactgccgccaccgcggcatccacgctggcgcgctcggtgatgtcgcagcggatcgccagcgcccgcccgccagcctcgcggatctggccggcgacgcgctcggccgcttccgggttaaggtcgagtacgcccaccgccgccccggcgcgcgcaaagcgcaaacacgttgcaccgccgataccaccgccaccaccggtcacgatgaccgtcttgccttcaagtccttgcacagcgttctcctttcaggattccggtgctatcgtgccggccatgacgccgtcacatcgcaccgccaattaggtaaatatatttacctataataggaggcagccattgcctgcgcaagacgccaacactgtgaaaaagactatggttaacccggacgtagaagtagaactccccacaaacgcgcgcatggaactggccaaccggcttttcttccggctataccaatgcgcaaatatgttgcataaaacgggatcacgagccgtcgaggcagagggcctgacgacgcagcagtgggccgtgctcggcgcgttgtcgcgtccggaagccgccgatggcatgagcgtgggcgacctggcccgctacctgatggtgagccggcaaaacctgtcaggactggtcagccggatggaacgcgacggccacgtcacgctggccccggacggccgcgaccgccgctcacggctgatacggatgagcgaaccgggccgggaggtctggctgcaccaggcgcagccgaagatccgggcctattacgagcaggcgctgacggggttttctaccaatgacctgacgcacacgctgcattacctgctcaagttgctggacaacatgcgtgcgctcgacacgcccgacagcgcagacggtggcagcccaggggactgagtcgcacgcagtatcgcaactgaaacacaccggcacacaccggccggctggaacagccgagcgcgcgtccgcgatccgcatcctggcctgccgcgccgactggcgcgcaatatgcgttggcatgaagttgctcagacatcgcgagcatcaacggtgaggcgccatgccattcgcgcctcgccacgccccgaagccctgaaccactgccccggccgcttgccccatgcacgccgccgggacggcgaccgatccaaccataaccggaggtcccgccatgacccgctacatcgtgctagccagcttcaccgaccagggcatccgcaccgtcaaggacaccaccaagcgcgcggccgccgtgcgcgagatgggggcacgcctgggcgtgcagatgaaagacatctactggacgctgggcgaatacgacatcgtgctcaccgtcgaagcgcccgacgacgagaccatgaccagcttcgggctgaccatcggcgcagccggcaacgtgcgcacccaaaccctgcgcgccttcaatagcgacgagatgcagagcatcctcggcaagatgggctgacccctgccccgggaacgcacaacgcccgccggggcatcccggcggacgttgtcgtttgccgggcgcggcacgccggctcagaacccttccagcaccagcttgccgatagtgcgcccgccttccagcatggcgtgcgcgcgccgcaggttctccgcattgatgcgccccaggttctcgcccagcgtggtctgcaggcgcccggcatcgaccagccgcgtgacctcgttaagcagacgatgctgcgcgaccatgtcgggcgtgctgtacatggcgcgcgtgaacatgaattcccagacgaaggtggcgctcttgttcttgagcaattccaccggcaacggccgcgtatttgcgacgatcgtgcagatcttgccctgcggggcgaccacttcagccatcgccgggaaatgcccgtcgatgtcgttgaagcagaggatgtagtcgacctcggcaaatcccagcgccttcagctgcgccggcagatcgccacgatggtcaaccgtatggtcggcgccaaggcggcggcaccattcctgcgactcgggccgcgacgcggtggcgatcacggtcagcccggccagcaccttggccagctggatgccgatcgagcccacgccgcccgcgccgccgatgatcagcaccgggcgcccggcgtgatccccattgggcgaaatgcccagccggtcgaacagagcctcccaggcggtgatcgccgtcagcggcagcgccgccgcgttggcgaaatccagcgaggcaggcttgtggccgacgatgcgctcatcgaccaggtggaactcggcgttggagccggaccgagtgatgctgcccgcgtagtagaccgggtcgccgaccttgaacagggtcacctccggccccacggcggccaccgtgccggccgcgtcccagcccagcacgcgcggcgcgggctctacctgcgccttgggcgcgcgcaccttggtgtcgaccgggttgaccgagacggcctcaaccttcaccagcaggtcgcggccgccggggctgggcatgtcgatctccacgtcttgcagcgaacgcgggtcggagatgggcaggtactgggtcaggccgatggctttcatggcgggctccgggttgtgtagggaatgaaccgaagcgtagcctgtcacgattgatttgattagccggaagctacagcaatcaatttcccgaaactccggataatcacccaacaaaaagggccgcctgcgctacccgcgcagacggccccgccagggcttgccgtcggccctacaccgccgccaggatctgcccgccgccgtagctcgactgctccggcggcgcgccgcccagtgccatcttcaccgcgcagtacttgaactccgggatcttgccgaaggggtccagtgccgcattggtcagcttgttgatcgccgcctcgtaatagcagaacggcacgaacaccgccccgcgcggcgtgccggcatcggcccgcgcgtacagcgtgacttcgccgcggcgcgatgccagcgtgaccacgtcgcccggcttgccgcccagcgcgtccaggtccagcgggtgcaccagcgccaccggatcgggctcgatcgcatccagcacgccggcgcgccgcgtcatgctgccggtgtgccagtgctcgagctggcggccggtgatcagcaccatcgggtagtcgatatcgggccgctcggctgccgggatgatgtcggccggcacgaagcgcccccggccgctggcggtcgggaagctgtcgataaagatcaccggttcgcccgggtcgccctcttccttgcacggataagtcactgcgtgttcgcgctccagccgctcccaggtcacgccgccgatgctgggcatggcctggcgcatctcgtcgaagacctcggccacgccgtcgtagtgccagtccagccccagctgcgccgccatctgctggatgatccacaggtcctggcgcgcctgccccggcgggttcaatgcctggcggccgagctggacggtgcggtcggtgttggtgaaggtgccggtcttctccgggaaggccgaagccggcagcaccacgtcggccaggtaggcggtctcggtcaggaaaatgtcctgcaccaccaggtggtcgagcgaggccagcgcctggcgcgcatgctcggcgtcggggtctgacatcgccgggttctcacccatgatgtacatgccgcgcacctcgccgcgctcgatcgcctgcatcacctcgaccacggtcaggccgggctggcggtccagcggcatgccccacagcgcctcgaagctggcgatcgccacgggatcgtccacgcggcggtagtccgggtacatcatcgggatcaggccggcatcggacgcgccctgcacgttgttctggccgcgcagcggatgcaggccggtgccggggcggccgatctggccggtcatcagcgccagcgcgatcaggcagcgcgcgttgtcagtgccgtgcacgtgctgcgacacgcccatgccccacaggatcatcgaggccttggacgtggcatacagccgcgccacctcgcggatgacttcggcctcgatgccgcacaccggcgccatcagttccgggctgtacgccgcgacattgcgctgcagctcgtcaaagccgatggtgcggctgtcgatgaagtcctggtccaccaggccctcggtgacgatgacatgcatcatcgcgttgagcagcgccacgtcggcatcgggcttgaactgcatgaagcgatgggcaaagcgcgccaggtccgagcggcgcggatctgccacgatcagcttggtgccgttcttcaccgcattcttgatccagctggccgcgaccgggtggttcacggtcgggttggcgccgatcacgatcaccacctcggccttgtcgacatccatcaccgggttcgataccgcgcccgagccgatcccctccagcagcgccgccaccgacgaggcatggcacagccgcgtgcagtggtcgacgttgttgctgccaaacccggtgcgcaccagcttctggaacaggtaggcctcttcattgctgcccttggccgagccaaaccctgccagcgcgcgcttgccgtgggtgtcgcggatctgcgcgagcttgccgccagccagcgccagcgcctcttcccaggtggcctcgcggaacacgtccatgacgtggtccggatccatgacgaaatcgccctgcttgggcacgccttcgcggcgcaccagcggcaccgtcaggcgctgcggatgctgcacgtagtcaaaaccgtagcggcccttcacgcacagccgctcgtggttggccgggccatcgcgcccttccacgaacaggatgcggttgtccttgatgttgtaggtcagctggcagcccacgccgcagtacgggcagaccgagtccacctgcttgtccggcaccgccagcgcggcgtcgcgcgcgggcatcagcgcaccggtcgggcaggcctgcacgcattcgccgcaggccacgcaggtcgacacgcccatggggtcgtccatgtcgaacacgatgcgggcttcgtcgccgcgcagggccaggccgatcacgtcgttgacctgctcgtcgcggcaggcacgcaggcagcgcgtgcactggatgcaggcatccaggttgacggcgatggccggatgcgacaaatccgccgccacgcgttcgcgcggggcaaagcgcggcttgccgacctccagcttcgcggcccactggtccagctcgttgtggcgggtgtagtcggtctcgggcatgtccgactgcagcagttccagcaccgtgcgctgagcgcggcgggcgcgctcggattcggtctgcacctgcatgccctcggcgggatagcggcagcaggacggggccagcacgcgctcgccctggatctcgaccatgcaggcgcggcagttgccggcgggctccaggccgtccttgtagcacaggtgcggcacgtcgaagccttcgcgctgggccaccttgagcaggctttcgccgggctgggcgctcacctcgcggccattgagcgtgaaggtgacggctggctcggcggattcgacaagcgcgcgttcggcgcgggtcagtgcattcatgtcagtctctcaggccagttcgtgcgggaagtacttgatgacgcagtcgacgggattgggcgcggcctgccccagcccgcagatcgatgcatcgcgcatcaccgcggacaggtcatccagcgccggcaggtcccacttcggctggcggatcaagtcgagcgtcttggcggtgccggtgcggcacggtgtgcattgcccgcaggactcgtgcttgaagaagtgcatcaggttgcgcgctgcctgcgtggcgctgtcctggtcggacaggatcaccaccgcggccgagccgataaagcagccgtagggctgcagcgtgtcgaagtccagcgggatattgcccatcgacgccggcaggatgccgcccgaggccccacccggcaggtagccgtagaacgcatggccgtcgagcatgccgccgcagtattcatcgatcagctcgcgcacggtaatgccggccggtgccaggtgcacgccggggcgtttcacgcggcccgagaccgagaacgagcgcaggcccttgcgcccgttgcgcccctgcgaggcaaaccactcggcgcccttctcgatgatgtcgcgcacccagtacagggtctcgaagttgtgttccagcgtgggccgtccgaacaggcccacctgcgccacatagggcgggcgcagccgcggcatgccgcgcttgccttcgatcgactcgatcatggccgactcttcgccgcagatataggcgcccgcgccgcggcgcagttcgatcgtcggcaggccggggattggcgggtcttgctgcagccgctgcagttcttccgccagcagctcgcggcagccggcgtattcgtcgcgcaggtagatatagatcgctgacacgttgaccaccgtcgccgcgatcagcatgccttccaggaaacggtgcggatcgcgttccaggtagacgcggtccttgaaggtgccgggctcgccctcgtcgatgttgatggccatcaaccggggcgcgggctcgttctgcacgatgcgccatttgcgcccggtcgggaagcctgcgccgcccaggccgcgcaggccggagtcctccatcgtgcacagcacggcggccggatccaggtcgccgctggcgagggacttcagcaaggcatagccgccgtccttccggtaagcgtcgtagccgatatagggctcgggcgcatggcgcacggcctttgcctgcacggcggcgtcgatggcctcggccgtggcggtgtcgaccggattctgcccgaccagcgccgcgggcgccttctcgcagcggccgatgcagggcgcggccaccacgcgcacttcagtgccgagcagcgcgggcagcttgtcgatcagcgcctgtgcgcccgccagctcgcaggcaatgccttcgcatacgcgcacggtcaacgccggcggcggtgcgatctggccgtcggcgtcctcgcgtaccacgtcgaagtggtggtagaaggtggcgacttcatagacctcggtcatcgacagccgcagttcgctggccagcgccaccaggtgcggcatcgccagctggccgtagcggtcgttgatgcagtgcaggtgttcgatcagcaagtcgcgccggcggggcatgtcgcccagcgccacgcgcacttcggccagcgcggccgcgtctacctgccggcccttgggctggcggcgcttgcgctgccggccgagccccgtcgcctcgagaggaatgacaacctggttcatggcgtgcctggattctgtttgtgggtatccgatgtgcgatcaggaaggcgcccggcgggccgcctccctgtcgctctttctatttttcgtattgtgctaccgggcgcggcgcctgtgcacgcatcgcagccgccacgtccggatcctgccggcgccggaggcgccgtactgctttcttcatcaggtcaggtcttccggcacggtacggtagcccatcggtgccgaggcattggcatgcacatacttgcgggcatgggcctcgcgcatcggcttgagcacgaacagcgccatcaccgcggtcaatgccgccatgccggaggccaccatgaagaccgcatgccagctgccggtggcagtggtgatcacgctggagaacggcaccagcagcgcggccgtgcccttggcggtgtacagcaggcccgcgttggtggcggcaaacttcggcccgaaggtgtcgccgcaggtggcagggaacaggctgtagatctcaccccaggcaaagaacaccacgcctgtcagcaccacgaaggcaaccggatggtggccgtacttggacagcagcaggatgccgatggcctcgaccccgaaggcaaagaacatggtgcgttcacggccgatatgatcggagatccagccgaagaacgggcgcgtcaggccattgagcacgcggtcgatggtcagtgcgaaggtcagcgccggcaaggtcaggccgaggatcgagatcggggcgtcgtgcaggccgaagtccttggcgatcgggccgagctgggcggtggccatcaggccgccggcggccatcatcacgaacatcgcgtacatgacccagaagatcggcgacttcagcacctcgcgcggcgaagcgttgtaggttgcggcagccttcagcgtggacttgacctcgctcaggatcttggccgacggcgggtacagggccatgcccaggatgaacacgatcaggccctggccaagaccgaaccacaggaacgcagcctcatagcccgaagtcttgatcatgttggcaatgggcaccacggtcagcgccgagcccgcgccgaaaccggctgcggtaatccccgctgccaggccccggcgattgggaaaccatttcagcgcgttgcccacgcaggtgccatacacagcgcccgcgcccaggccgccgatcgccgccgcgaagtaaagcatgggcagcgaggacgccaccgagttcagggcccaggcaatggcgcacagcaggccgccgcccaccactaccggacgcgggccgtacttgtcgaccagatagccttcaatcgggaccagccaggtttccgtcacgacgaagatggtgaaggccacctggatcgcggtgcggccccagtggtacttgtcgtcgatcgggttgacgaacagcgtccagccgtattgcatgttggcgatcatcgccatgcagatcacgccgaataccagttgcacccacggcgacgcaaagcgcgacgtggactccctctgctgcaattccatgatgtctccttatagcggcgtgccgccaaggtggaagatgggcgcctgtagacgcctctgcgtgactctcagtcaaagaacagctgagccgttctagtgctatacggtatgtgatatatcaggtaagtcaagcgtattcgtcgcggctctgcagcatgggaccgcggtgagtgacgcctgggtggccgttgctgcagtgcgactggtgcgcacactgcatcaatggccggtccgacagcatccggagtcgttggaaatcaagcagttgccatgcatcggcacattaatcggccgactgatggcatccgcaagaatgccggggatcgcgccccggaaaaatcgggaaaacgatgaattggggaaagtccctagatgcatacattaatgtctgatgacgcgcgtatggcttgggaacgacgccggaagcggcgttaaagacacagcagggagcctgccggcctggaaccggggcgcaggaagaggggtcgtgccgggcgatcgctggcagcgatcggggaggaagatggtggcggccgcaggttcgtgcagaaccctgccctggctcgcggcgaatgccgcagatcaggtatcaaccgaggtactgccacaaggggtgccggccgctacaacccttgctggttgcgcggttcagcgcgatggcgcatggcgccggcgcgcattacgcgtaggccagctcaccggcagcgggcacaatgcgcgacgggctggcacggcccacgccatcgccttcctggttcgagcccaggccggcgaagcgaccgtgctcctgcgcggtcaccagcacgtccatcggcaggcgcgtggccagcagcgtggtcacgccggcaccggcagcaatcaggcccaggccaagagcgaagagaagagcgacttccatttgaaaactccaatagcgttgtgatcaggagttttcattatatgctgcaccgcactatgtgtaaatatcctgtatgtgatatatcaatagaagttttgcactaatacaacgaatgcccgccccatgcccccctgatgagccgattgcctcacaccatggtggtttttcgatgcaccaccggcgactcctgatattcctggccacgcaaggcatcccagattgccgcggcattgggcttgagcgagcggctcttgcgccgaaccagcatcaccgtggaagtcacctgcggacgcagcggccgcatcactgccgccggattcatgccgcccacctgggcacgcgacggcaccacgccgatgccaaggcccagcgccaccatgccgaacactgcggcaaagtggccgagcaactgcagcgagcccgcgcgcacgtgatagctgctgagcgccttctccaccgcgggctgcatgccgcactgctggtccagggccagcacgcgggcatcgctcaggtcgccccaccctaccgcgtcgcgcatcgccagcgggtgctgggcgggcaggacggcgtggtaggcatcgacgcacagcggttcacaatagaggtcgtcggttggcttcggatcggtggcaatgccgaagtccacctcgccgctgcgcacgctttgcagcaccgactcctgcgagcggtccttcaggtggatggcaatcgccggccacgcttgccggcagccggccagccacgtcggcaccgacatcgagctgagcaccggatccgaagcgatctgcaccaggccctggcacggacggctggcgctctggctgtcgcgcagggtctgctcgacctcttcgatcaggtggcagatgcgctgcgacaggtgctggccggcatcggtcagttccacctggcgcgtggtacggtcgaacaggcgctggtcgatctcttcttccagttcacgcacgctgcggctgaccgcggattgcgtcaggcccagttcaaccgaggcacgcgtaaagctcttgtgccgcgccactgcggcgaaggccttcagttgggggagcgagatattcacgacctgcccccctgccccgcatcggcgtggctgcgacgggcctcttcaggcatggcggggtgccgcgttgcacgcaccgttgcattcagtccggtcacggtagtctccttgtgtattttttgtcgtggctgtaggcagccatcgttgttatcggccatgcttgtggccattggcgggctcctggcgcaagccggagagccggattcggggcggggcaggcaaatccgacgattgatgctacttgaatctaagatcagcactgcataaagttttttatcgtttatatagccaatcgtttatatattgcacgggacgaggatgaggaacgccacactgcggcagttgaaggtctttgagaccgttgcccgccatatgagcttttcacgcgctgccgaggaactgcacctgacgcagcccgcggtatcgacccaggtgcgccagctggagcaccacgtggggctgcccctgttcgagcagttgggcaagaagatctacctgaccccggcgggccacgagatgctgcattacagtcgcagcatcatccagcagttccgcgaggccgaagacgccatgtcccagctcaagggcatctccggcggccggctcaacgtggcggtgatcagcgccggcgactatttctttccgcgcctgctggccgagttcatgaaccgccatgaaggcgtgacgctgaaccttgccgtgcataaccgcgaggaattgctgcaccagctggccggcaacctgaccgacctggcggtgatggtgcgtccgcccgaaggcatggacaccatcaacgaggccttcgccccccatccctatgtcatcgtggctgcgcccacccacccgctggtcggacagcgcaatatcccgctggccgagctggctgatgaagccttcgtttcacgcgagaaaggctcggatacctggaattcaatgcaggagggctttgccgggcgtctgtcgaacatgcgcatcgcgatggagatcaagagcaccgagaccatcaagcaggccgtgatcgccaatatgggcatcgccttcctgtcggcgcacacggtcggcctggaattgcaggccggcaagctcgcggtgctggacatcgagggcttcccggtgatgctcaactggtatgtggtgcaccgcaagaacaagcggctgccaccggtggcgctggcgttcaagcagttcctgatggaggaaggcgcgggactgatcgagcggattaccggggtggaaggtttgatcagtcagaatgcataaacaattgattatggtttcgctatgaaactttaattatcgtaaatcatccgcggtccctatgcttgtctcaacccaaccgctacagcgcatctgaggagacgagcatgaaccaggtccagcaggaaagcagccaggctgccatcacggtcggcaccgataaccaacccattccgcgcgacacccagctcgccgcctacaacgccgcgtttatcgagctgggcctgcgcttccgctgggacgccgagatgtatgaatggctgtgcggcatcgaatgcgagaaggcgcgcgtggcccgctatatcgaagaacaccacgcgcacctgctggccgcctatgacgccgcctttctgagcgcgctgatcttcgagaagaagaacgaatacctgcgcgcggtcggtcatctcaactgaagggccgctcggttcacggcgaggcgcgcgagcggcctcgcctttttgcctggcccgcatgtccctcaggcgaggtcggcctccgctgccttacctgcggggcggggcagccgtttgatgcgcttgcgcggcctttgcgccgcgacccagaggtcgtatgccatctgcatgccgccccacatctcgcggctcgcgcccagggctccttccaggcgaatggcaatatccggcgtgatcgatgcatgaccattcaggatgcgcgagagcgttgcgcgcgtcacgctgatgtgcgcggcgaacgccgtaatggtcatatcgtccatgccagcgagccaatcggccagcaccgcgccggggtgcggcgggttgtgcatgcgcgtcatgatgaagtccttcagtggtagtcctggtaatcgacgacgatgacgtcgatgccgtcgaacatgaatgtcagccgccagttgccattgacgctgacagaccagggccggacatgtcgccgcccagttgatgcagcttccaacctggcacccccatgtcccggggtctcgtggcgtgatccagcgcaccgagctgattgcgcaatctctgcgcgtgatgcggctggattcccgccttggagccagtctcgaagaaacgtttgaggcccgcatgggcgaaactcttgatcatcgatttccaggtagcaaagaatgtataagcgttagaagcttgcttgcgttgccggggacggactctatcacctgaagcgcactgggaaaccagtcggcggctgcttttgagccattactcattccgcgcctgggggagctggcgatgtgccggccggcatggatccattgccatgccggcccgggcgcagtcgtcgtaagattcggcatcaacactcacgcgcccgccacttgcccggcttgccacccgtttcatgccgactcgacgcaccgacgaagaatttgcccacgaactgacccggctgctgagcaccgaaggcgtgtcgtcgctgaccatcggcgagattgcccgacgcatgcgctgctcacggcggcgcctgtacgagatcgcgccgaccaaggaagcgctattcgtcggcatctgccgcgacgtgctcgctgacaacctggaaaggggctttgccgcggcgcgccgcgaaagcgatgcggcgcgggcagtgtccgcctacctgcatgccgcgctcaacacatcgggactgagcaaggccgcgctggcggacctggatgcgatcgacagcggccgggcggcattcgacgactaccagctggcgcgcgtgcgcgggcttgagagcctgctcgaggcaggcatgcggcaagggctgatggcgccgcacaatccgcggctggtttccgaagcgatcctgggcgccgcgcaccggctgcgcaaccagcagttcctgaaggaaaccggcctgaagatcggcgatgccttcagcgagttctacgagatcatcctgaacggcctgctgtgccgcgcggacaccggcgcgcgctcgtcccagccgcacgccggaaggtaaccgcgctcaggccacctgcctctcctggccgccccagtagcggccgcggatggccttgcggtcgatcttgcccagcgcggtcagcggcagctcatccacgaacaccacctgcttgggcgcattgaccacgcccttgtgctgcgtcacgtggccgatcacgtcggcctcggtaagcgcggcaccgggccgtgccacgaccacggcggtgaccgcctcgccccacttggggtcggggatgccgatcaccgcggacatggcgatggccgggtgcagcgccaggcaatgctccacctcgctcgggtacacgttgaagccgccgctgatgatcatgtccttggcgcggtcgacgatgtacaggaagccctcgctgtcgcaacgggccatgtcgccggtatgcagccagtcgccggcaaagaccttggcgtcttcctcgggccggttcaggtagccttccatcaccagcggaccgcgcacgcacagctcgcccacctcgcccggcgcgacttcacgcaggtcggggtccagcagcttgacctggttgcccgggatcaccttgccgcacgagcgcaggcgctcggggttgtccggatcgtggtcgcgctggctcaggtagctgatgcacatcggcacttcagcctggccatagacctgtccgaacaccgggccgatgcggcgcagcgcgtcagcgagacgcaccggcgcgatcggcgccgcgccgtagagcaccagctccaggctggacaggtcggccgcgtccagcccgtcgcaatcgagcaggccatagatctgcgtgggcaccaaaaaggtcaggttgatccgttgttcggccacgcgtcgcaggaaatcggcgggactgaacttgtcgcacacgtagatggtgccgccgcgcagcagcgtcggcaggaacaggctgccggacgcatgcgagatcggcgtggtcaccagatagcggatctgcgccggccattcgtagctggccagcatgtactgcagcaccgtcaccgtggtccggtgcgtatgcaggatgcccttggaacggccagtggtgccgccggtataggccagccggctgatttccgtggggtcgtcgccgggaaccacgggcgtgtcatcgaacgcagccgccgcattggccaggccaggcccgaactcgccatcgtccagcggcaggacctgcaggccggcgccagctgccagcacgcgcgcgcgctcggtgaagcgggcgttgtccaccaccagcgcccgcaccccggcatcctgcagcacgaaggcgtgatccgcttccgatgccatcggatgcagcgacacattcttcagcccggccagctgcgcggcgatgatggcggcgaccgcttcggcgcggttgcccaccaggaaggccacggcatcctggcgcgccaggccgcgggcggcaaacagccgcgcgacgcgcgcgcactgccgcgcgagcgcctcatagctcagcgtggtgtcgtcgccgacgatggcgggcacgccgggcctggcacgcagcgcggccgcatagagctggcccaccgtagcgccgccatggactaccgcagcggccgaagcttgacggctcatgttgtctcctcggatctgtctttgtcagggctcccaatgtaggaggcattcggtactcagtcaacgattttggtaccgaaaagaccacgatcggctacgccaaagcggcgctggaagtgcatgccggccacctattcgggaaaactcgggggacaatcgagacctgcgcggcggccccggccggggccgccgcgcaaacaggaaacggccaggaccaggcctggccaccgggccgacgcgctgcgcggctggtccgggatcacggaaatggcacgcgcctcaggcctgttccttgacctggttttccagctccaccagccgcttcttcagcgcccgctcctcctggaagcgcacggtctcgtcgcggatcacggcgacgatgccggtgatggcgcccgcatcatccttgagcagcgccacggtgaaggcgatcgacatggccttgccgtccttgtcgaccgcgggcaccttgagcaggtcgtggccgtagcgcgtgatgccggtcgccatggtcttgccgtagccctcccagtgccgcccgcgcaggcgctcagggatgatcaggtcgagcgacttgcccatggcctcggcctgggtaaagccgaacatgcgctcggcggcgggattccatagcgtgatggcgcccttggcgtcggagatgatgatggcgtcgccgatggcggacaccagttgcgcgtaatcgatctggtctgtcatggggattccctcgttattcccagggccggtcggcgccagcctgtcatggccatcaaggtagcgtgccacatggccacgctgcaagcaaaaacgccggggcccgctatgcgcgagaccccggcgtacactccggccacaagtgccggcgggcagcgtcagatcacctgggactcgcgcaggcgcttgatgtcgtccgcgccgtagcccaggccggccagcacctcttcgctatgctcgcccagcagtggcgacccggtgatctccggcttgaggtcggagaacttgatcgggctgcccaccgtcaggtaggtaccgcgctccttgtgcggcacctcggtgatgctgccgctggcgcgcagcgacggatcggcggcgatttccttcatcgacagcaccggcgagcacgggatgtcgaacttgcgcaggatgtccacggcctcgtacttggtcttgtcggccagccattcctcgatggtgttgaagatatcgaagatatgcggctggcgagccttggcggtggcgtagttgggatcggaaatccattccggcttgcccagcgccttgcagatcggctcccaggcatggccctggatggtgaagtagatataggcgttggggtcggtttcccaccccttgcacttcagcacccagcccggctggccgccgccgcccgcgttgccgccgcgcggcaccacgtcgctgaagctgccgtgcggatactgcgggtactcctccaggtagcccaggcggtccaggcgctgctggtcgcgcagcttgacccggcacaggttcagcaccgcatcctgcatcgacacagccaccttctggcccttgccggtcttgtcgcggccgatcagcgcggtgaggatgccgatggccaggtgcatgccggtgttggaatcgcccagcgccgcggcggacaccgtcggcgggccatcccagaagccggtggtcgaggccgcgccgccggcgcactgggccacgttctcgtagaccttcaggtcttcatagtggtggccgtcgctgaagcccttgaccgaagccacgatcatcttcgggttcagttcgttgatgcgttcccacgagaaccccatgcggtccagcgcgcccgggccgaagttctcgaccagcacgtccgactcgcggatcagctgctccaggatcttcttgccttccggcttcttggtatccagcgtcaggctgcgcttgttgctgttgagcatggtgaagtacagggcatcgacatccgggatgtcgcgcagctgggtgcgcgtcacgtcgccggaaccggggcgctcgaccttgatcacgtccgcaccgaaccacgcgagaagctgcgtgcaggcgggaccggcctggacgtgcgtgaagtcgatgatcttgatgccgttgagtgggaggttcactttcgttctcctattggatcagaggggtgaaattcgggtgaattacttcttggccgagctttgcggattcagattggtcagacgaccgctttccgtgccagcagccggatcgatgacagcgttgaccagcgtgggcttgcccgagcgcagggcttcgttcaccgcagcctcgagttccgccggcgtggtgacgttgcggccgacgccaccgaacgcttccatcatcttgtcgtagcgcgcgcccgggacgaacgtcgtgaccgccggatccttgccgccggtcggattcacgtcgatgcccttgtagacgccgttgttgttgaaaatgacgatgcagaccggcaggttgtaacggcagatcgtctcgacttccatgcccgagaaaccgaacgcactgtcaccgcacagcgccagcaccggcttgctggtctcgaccgccgcggcgaccgcgtagcccatgcccacgcccatcacgccccaggtgcctacgtccaggcgcttgcgcggctcgtacatgtcgatcacggcacgggcgtagtccagcgtgttggcgccttcgttgacgaacgagatgcccgggttggccttgaccacatccttcagcacgttcagcgcgccgtggaagttcatcggcgagacatccttggacctggccagggtctcggccatcttcgccaggttcgtgtccctgcggtcggccaccgcgttcagccactcggcgcccggcttggcaaagtcattgccgaccttgtcgaggatcgccgacacgcacgaaccaatgtcacccactaccggcgcggcgatggcgacgttgctgtccatctcggtcgccgcgatgtcgatctggatgaattgcttcggcttgccccaggtcttgcccttgccatgcgacagcagccagttcaggcgggcgccgaccagcaacaccacgtcagcttcagccagcacatacgagcgtgcggccgaggccgattgcggatgcgtatcgggcagcaggcccttggccatcgacatcggcaggtacggaatgcccgtcttctcgaccagcgtgcggatatccgcttcggcgcgtgcgtacgcggcacccttgcccagcaggatcagcgggcgcttggcgctcttcagcagcgcgacggcacggtcgatcgagtccggtgcaggcagttggcgcggggccggatccaccaccttgatcagcgacttgcggcccttctcggcttccatcgactggcccagcagcttggccggcaggtccaggtacacaccgcccggacggcccgacacggcggcacgaatggcacgcgcaatcccgacaccaatgtcttcagcgtgcagcacgcggaaggcagccttggcgtgcggacgggcgatggccagctggtccatctcttcgtagtcaccctgctgcaaatcgacgatctcgcgctcgctcgagccgctgatcaggatcatcgggaagcagttggtggtcgcatgcgccagcgccgtcagcccgttcaggaagcccggcgcagaaacggtcaggcaaacgcccggcttttgggtgagaaagccggcaatcgctgctgcgttgcctgcgttctgctcgtgacggaagctgatgacgcgcatgccgttggcctgtgccagacgggccagatcggtgaccggaatgccgggcagaccgtagatgttctcgatgccgttcagcttcagcgcgtcgatgaccagatgaaaaccatcggtttgtgcctgatgttcttccgtggcgtgacgctgcagttcgtttccgacttctgccatggttgattccttctatacaaattgactggggttggaattcttctaattcagggtgtcttccgcgtggtgctcccgacccgcttggcttcgacgacttcggacatgtcttggtctcctcgttgaactctttacggggcggggcactctcgccttctcgcccttcgctgttgctacccgtatgccttgcggcgcccgatcgtttcactcgatcttgatgacatacggtatgtgatatatcagaacgaagcaagaagaatttcccctagcccttcaagtttcgtggatgcggcgcagcaattttgcaggcaattacggctaaatcagcgtaatttctgaaagcacgcgattcatgcgcaatcggcacagatttccgggccatgtcgaagcctggaaatctcgccgggattacgcatgaagatatactacataccaaaaattccagcggctttatggctctctggaacacattgccgcgcactggcgtcctccgcgaacaccagcgcgcccactaatgggaatgtcctgcccccgctccggaagcccggcagcctacgccaggctccccctctaccgttcagcccgggattactccccctgacgcggcgaaatgccagccaggaacgcggtatcggacacgcgcactgcctcggcatgcccggtgataaagcgcttgcgcacgggcgccagcaacaccttggccgagatccctgccgcaatcgtcaccaccgccgccaccgagaacacggctccccagccgccatgcgccgacaggatcgatgccagcggcaccaccatcgccgccgtgcccttcgccgtgtacagggtgccggcattggccgcggcgaatttgctgccgaaggtatcggcgcacaaggccgggaaaatcgagaagatctcgccccagaacaggaaggtcagcgccgcgaagaacatgaaccagtacgggttgtgccccatctgcatcagcccgagcagcgccagcccctcgccgacgaagatcacgaacatggtgttctcgcgcccgaacttgtccgacaggaaaccgcacaagggccgcgtaaagccattgcacaggttgtcgatcgacaaggtcatggtcagcagcggcagcgtcatgcccagcatcgtcaccggcatcgaggcgaagccatagtccttggcgatgggcccgagctgcgccgtcgccatgatcccccccgccgccaccgcgacaaagctcacgtagatcagccagaacaccggcgtcttcaccatctgccccggcgagaactcgaccgggttggtcagtaccgccttggccgccaccgcgcccttgggcggcctgggcttcaccagcagcagtgccagcacgaagatgcacacgccctgcaggatgccgaaggtcaggaaggccttttcatagcccgagctctggatcatgttggcgatggggatcaccgtaatggccgcgcccgcgccgaaacccgccgccgtcagtccggccgcgaggccgcgcttgtccgggaaccacttcagcgcgttgccgacgcaggtcccatagacaccgcccgcgccgatgccggcaatcaccgcggccgcatacagttccggcagcgtggtcgcataggcattcatcacccatgccaggcccgcgcagatcgccccgcccgccactaccgggcgcgggccaaacttgtccaccagccagccctccagcggcaccagccaggtttccgtcacgatgaaaatggagaatgccacctggatggcggacgcgccccagtgatgcttggcgtccatcggtgacacgaagagggtccagccgtattgcaaattcgccaccagccccatgcacaccacgccaattgcaagctggatccaacggttctgcaggccgcgcccgttcacgttgccgtgaccggccggggccgatacttcaaattgcgccatctgtcttgtctcctggtactgtttgtttgtgcctcgactggcacaacagggctttgtgggttgcccttctcacaactagaccggcgcctggcattgcggcacatgaagtcgtggattgatgctacctgaagcttaatttgactagtcttaaagttttttatcgtttctatttgcgatcgtttatatatcgcggagctggcatgaatcgcccgccgggcttccataacaggttgtctatgggcccatccagacaacaaaagccaccgccgccccgacaaacgcggggcggcggtggcttcgcggccgcctgaactgctcagcttggagacctcgactcgaccaactcaggccggcgcttcctccagctgcctcagcagggcatcgacactgcccttggcgtcgccgaaccacatccgcgtgttgtccttgtagaacaacgggttgtccacgcccgcatagcccgccgccatgctgcgcttggacaccaccacggtgcgggccttccagacttccagcaccggcatgccggcaatggggctgcccgggtcttccagcgcaccggggttgacgatgtcgttggcgcccaccaccagcaccacgtcggccttctcgaagtcgtcgttgatctcttccatctccagcacgatgtcgtacggcacgcgcgcctcggccagcagcacgttcatgtgcccgggcaggcggcctgcgaccgggtggatgccgaagcgcacggtgacgccctgcgcccgcagccgccgcgcgatctcgctgatggtgccctgcgcctgcgccaccgccatgccgtagcccggcacgatgatcacgtcgctggcgtccttgagcaggttgccgacttcctcgctggacaccggcagcacctcgccctgctcggtcgccgcgccctgtgcctgcaccgcgccgaagccgcccaggatcaccgacaggaacttgcggttcatcgccttgcacatgatgtagctgaggatggcgccgctcgatcccaccagcgccccggtgatgatcagcaggtcgttgcccagcatgaagccggtggccgccgcggcccagccggagtagctgttgagcatcgaaaccaccaccggcatgtcggcgccgccgatggccagcaccaggtgcgcgccgaccagcagcgcaatcaccgtcatcgccgccagcggcaccagcccctgctgcgcgtcgggcgcgctcaggaaggcatagcccagccacacgcaaaccagcagcgcgatggcattcaaggcatgccgcccgggcagcagcatcggcttgccgcccatggtgccctgcagcttcaggaaggcgatgatcgagcccgtgaacgtgaccgcgccgatcaggatgccaaggtaggtttccacttcatggatggccttctccgcgccggtcagcgcatggctatccaggtagttggcataacccaccagcaccgcggccaggccgacgaagctgtgcagcaccgccaccaactgcggcatctgcgtcatttccacgcgcctggccagcatggcaccggcgatgccgcccaccagcatcgcgccgatgatgatggcgatgccgtccgggctgcccgccagcacggtggtcagcaccgcgatcaccatgccggcgatgcccagcaggttgccgcggcgcgcggtgccggggtggctcagcccgctcaggctgaggatgaagagcgcgctggcgcccaggtaagcgatattgctgattccggatggcatccctgtctccccgtctctagtcccgctggaacatcttgagcatgcgctgcgtcaccaggaagccgccggcgatattgatggtggccagcagcaccgcgctgccggcaatcaccgccgtcagcagcgacggcttgcccagctgcaccagcgcgcccaccacgatgatcccgctgatggcattggtcacgctcatcagtggcgtatgcagcgcggcggtgacgttccacaccacctggtagccgacaaagatcgccagcacgaacaccgtgaaatgcgccatgaaggccggcggcgcgaccgcgcccaggcccagcagcgccgccgccgcgatggccagcgcgatcagcgtcgcgccggtgcggctgcgcggcggctcggcctcggcctgcaccggcggcggcgcggccggcgcctgctgctgcgggatcgccaccgtcagcggcggcggtggccaggtcaccgtgccctggtgcagcaccgtggcaccgcggatcatctcgtcgtccatgtcgaccacgagctggccgtccttgcccggcgtcagctccgtcagcaggtggcggatattggtgccatagagctggctggcctgcgccgccatgcggctgggcaggtcggtgtagccgatgatggtgacgccgtgctgccgcaccgcctcgcccggaacggtcagcacgcagttgccgccctgctcagcagccaggtcgaccaccacgctgccggcgcgcatcaggcccaccgtgccggcctcgagcagcttgggagcgggcctgcccgggatcagcgcggtggtgatgatgatgtcgacctcgcgcgcctgttcggcaaagagacgcatctcggcttcgataaaggccgggctcatctccttggcatagccgccgctgccgctgccgtcctcttcgatctcgacggtcaggaactcggcgcccaggctttcgatctgctggcgcaccaccggccgcgtatcgaaggcgcgcaccaccgcacccaggctgcgcgccgcgccgatggccgccagccccgccacgcccgcgccgatcaccagcacgcgcgccggcgggatcttgcccgcggccgtgatctgcccggcaaagggccgcccgaacgcatgcgcggcttcgatcaccgcgcggtagcccgccatattggccatcgagctgagcgcgtccagcttctgcgcgcgcgagatgcgcggcacgcagtccatcgccagcacggttgcgccgcgctgcgtcagccgctccagcatcgccatctgctgcgccggccagacaaagccgatcagcgtggcatgcttcttcagcagcgccgcctcttccacgcccaggctgggatggacctgcggcgggcgcaccttgatcaccacatcgaccgaagcccacaggctggccgcgtcgacaatggccgcaccggcggcgctgtagtcagcgtcggagaacgacgcttcctggccggcgccggtctccaccaccacctggtagcccagcttgagcagttccctgaccgagtcgggcgtggcggcaacgcgccgctcgcccgggtggacttcgcgtggcacaccgatcgtcattggcatggcattcaccgttttatggaaggaatcaggcgccggctcagccgcgcacgtggttgaccagcgagccgatgcccgcgatcgccacctcgaccaccgcaccgtccttcatcgaccccacgccgatcgaggtgccgcacgcaatcacgtcgccgggcatcagcgtcaggtcctgcgagatccggctgacctgttcctcgggcgagaagaccatgtccgacagcgggtagttctgccgctcgacgccatcgagccgcgtgatgacgctggcggctttccagttgaagccgcagacaatggccgggccgatgcagccgaaggtgtcgaagcccttggcgcgcgtccactgcgggaagttggggtcggccgtgatcagctcggccgcggtcacgtcgttgacgacggtgtagccaaagatatgcgcgccggcctcggccaccgacacattgcgcgccttgctgccgatcacgatgcccagctcgccctcatagacgatcttgccgtcgtagctcttggggcgcagcacggcatcgcccggcccggccagcgacgaggccggcttgagcaggaacagcggatgcgtgggcacgggcttttccagcttgcgcgcgagtgcgtggaagttgttccacagtgccaccaccttgcccggcgcacagggcgcgagcagcgtcagcgacgcgcgctcatgcacggcgccggtgggggcggggtcgttgaaaccgtcgccgtcatattcgacgacacggttgccatcggcttcgtcgatgcggccatggccgatgctgccgtcagcgcggcgaaagcgtatccaggtttgcacagcatgctccttgcgcaggcaaagcgggccctgcctgctccgatgtcggttgcaggatcttggaagaaatgggatcgtgggcggctcgcgcccggattcgtcattcccgcacaggcgggaatgacgtcaggcttgcgtcataccgcgccggccagcttcatcgcggcgatctgcgcgggcgagcgccccagccactcgagaatctcttcggtatgctcgcccagcagcggcgaacgctcgatctccaccggcgatgccgagagcgtgatcgggcagcccagctgcacgtagctgccgcgctgcgggtgctccagcgccttcaggtagccgcgctggtacagcgactcgtcctcgatcaggtccttcatcgacaggatcgggccgcacggaacatcgacctcgttgagcgccgccatcacgtcgaacttgctgcggccaccggtccatttctcgatcacggcgaagcagtcggccaggtgcttgaggcgtgcttctggcgtggcgtagtccggattggtgatcaggtcctcgcgcccgcacaggcgcatcagcggctcccagccttgcggctggatgatgacgtagacatagtcgttggggccgcccggcgcgcagcgcagcgccgcgcccggctggccgccgcccgaggcattgccggcgcgcggcacgtggtcgccgaactcttcgttcgggtactcgcgcagcgggccgttggccaggcgctgctggtcgcgcagcttgacgcggcacaggttcagcaccgcgtcctgcatcgccacttccacgcgctggccgcggccggtgtgctcgcgctgcagcagcgcggccaggatgccgaccacgcaatgcacgcccgtgcccgaatcaccgatctgcgcgccggtgacagtgggcacgccctcggcatcgcccgtggtggaggccgaaccgcccatgcactgggccacgttctcatacgccttgcagtccgcgtacggccccgggccgaagcccttgatcgaggcatagaccagccgcgggttcaggtcctgcaggtggtcccagtcaaagcccgcgcgctcgagcacgcccggcccgaagttctcgatcagcacgtcgctgcgctggaccaggtcttcgagcagcgccttgccttcgggcgtcttcatgttcagcgtcaggctgcgcttgttgctgttgagcatggtgaagtacaggctgtcggcattgggcacgtcgcgcagctggctgcgggtgatgtccccgcggccgggcatttccaccttgatcacgtccgcgcccagccacgccatcagctgcgtggccgaggggcccgcctggacgtgggtcatgtccaggatgcgaacgccttgcagtgccttggtttccatttcggatgtctcctcggacgatggtttcacttgtatatggtctgttcctggtgctcggcgcgtactcgctcgcgtccgttccggccctcttgatgacatacggtatgtgatatatcagaagagagcaagaggagtttgcccgatgcaacacaaatttcgacgatgcaatgcagcaatcggcctgctttgcttgcccgaagtgggaaacccagtgaaatcccgaatcagtcagccagcatctttttcgcattgatatatcacataccataacgcgaaaagctcgcgcgtcatccgggaacgtacaaaagcaaaacggcggaccaaggtccgccgttttgccgccctaccccgcccgccttcagtcgaggaagtcgcagtgccgttccacgtagtcagccagatccagcgaatgctgccgcaccagccgctcggccagctcggtatcgcgtttctccagcgcctcgatgatgcgcaggtggtccacgatggagcgtgccgcccggtcgctctgcgagatcgtcatcttccggatcgcgcgcacgtggataaagatattgcggatcgtgtccatgatgatgtgcgacttggacagctgcacgatcgcctggtggaaggcgatattggcgtcggaatactcttcgatatgctcggccggagtggaatcgcggaagctgtcgaacatgctgcgcagctgcgcgatctcggcatcggtggcgttctcggtggccagccgcgcggccatgctttccagcgcggcccacatctggatcatctccacgatctcgcgcttggtcttgcgcatgatgtagatgccgcgccggggcacggtgcgcaggaagccctcctgctccagcagcgtcatggcttcgcggatgggcgtgcggctgacacccatggcctcgctcagtacccgctcatcgaggcggatctcgtcgcgcgactggtagatgtcagcgtcggcgatggcctggcgcaacatggcgtaggcctggtcgcgcaggctcgcgccggcattgatcggttgcacggacaaggccagcccgttgggctggacgatggattggctttgcgcagacatgaatgagctcgtgtgagaccagcggcagggtggccggaatggctgccccccgcattgccgcacagcttagcaaaaacgccggacccattacgaaaacgcatcaaacaatgcgttgttgtcatgcatcggcacagtagcggtgcgcggtctgtcgtatatggtatatcactatcgcctgcctttctcgcttcgcaagcccggccaacgctaccttggcgcgcctggcgtgcgccaggggatacctgacccggcggtatcccctgttcccagccgcgctcaggcggccagcttggccatcgtgtcgcgctgcttgatcagacccagcacggcatcgcacatcggcgtgggctgcgcgaccagacgtcccatttcctgcaccacggtcagcagcgggtcgatttccatggcccgcccggcctccaggtcctgcagcatcgaggtcttgtgcgcgcccacggcaccggcgccgtcgatgcgccgctccacgtcgacgcggaatttcaccccgaagcgctcggcgatgccctgcgcctcaaccatcatctggcgcgacagcgcccgcgtggccgggtcggcggtgatgacgtcgagcgtggcatgcgtgagcgcgctgatcgggttgaagcacaggttgccccacagcttgagccagatctcgtcgcggatattgtcgcgcaccggggcgtccaggtcggcggccatcatcatttcgctgagccgggtcacgcgcgccgagcggctgccatccggctcgcccagcggaaacttcttgccgtagacgtgcttgatcacgcccggcgcaacgatctcagccgcgggatagaccacgcagccgatcgcccgctccggccccaggcccttccattggcgcccgccgggatcgacgctttccagcgtgctgccggccaagtcgccgccatgcttgtagaaataccagtacggaatgccgttgacgccggtgacgaccgcggtttccggccccagcagcggctgcatctggtccaccacgcccggcacggaatgcgccttgagggtgatgaacacatagtcctggtgtccgagctcgcgcggatcgctggtgcagcgcaccttggccacgcgctcctcgccgtcgatcagcagcctgacaccatgttcctgcattgccgcgagatgggggccgcgcgcgacgaagctgacctccgcccccgcgcgcgccagctgcgccccgacatagccgccgatcgcgcctgcgccgtagatacacactttcattgctgtctccttgatggctcgatttggatcttttgatatatcacatactatattccatcgaggcgcatggcaaccgcgtagaacaacctttatctttccggatcacacggcgcgggcaagcggcgctgcgctaacatgacgcctgcatgtgccccgggcggaccaccgtccggcgccgagttgcaacctgacacccggagccccccatggaagcgtcgttggcattgctgcaggaccccgccgcgtgggcggcactggccaccctggtggccatggaaatcgtgctggggatcgacaacctgatcttcatctcgatcctgaccaacaagctgcctgaagccatgcgcgagaaggcgcgcaaggtcggcatcagcctggcgctggtgatgcgcctgggcctgctggccaccatcgccttcatcgtcaagctcaccgagccggtgttcaccatcctgggccaggggctgtcgtggcgcgacatcatcctgatcgcgggcggcgccttcctggtctggaaggccacgcgcgaaatccaccaccacgtcaccgccgccgaagaaggcgaggaaggcggcacggccaaggcggtgcagagctttgccgcggccatcggccagatcctggtgctcgacctggtgttctcgatcgacagcatcatcaccgcggtcggcatgaccgagcatgtgcagatcatgttcgtggcggtgatcgccgcggtgatggcgatgctgttcgcggccacgccgctggccaacttcatcaaccgcaacccgaccatcgtgatgctggcgctggccttcctgatgatgatcggcatgacgctgatcgcggagggcctcggcacccatgtgcccaagggctatatctatacggcgatggcgttctcggccgcggtcgaggggctgaacatgctggcgcggcaacggcgccagcggcgccgggccagcgggcaggcctgatgtgcggcggcggccgcttgcagccgggctgcgggcggccgcctgtaacagagggtgtccgaacttttcgcggacggcggcgtctcttacagttctgcacaacccccggacaataaaaggacgctttcgccacatgatgaaccgccgaaccctgctggtctccgccactgcctccgccgcgctcgccgcactgggcattaccccgtcggtgctggcagccagccggatcaaactcggcgacgcccagccattcggtttcgacgccctgatcgaacgcgcccgcgcactggccggcaagccctacgcgccgccgccgtcaccgcccgcggacgtgctgtcccgcatcgactacgacgcccacggcaagatccgcttccgcaccgacgacgcgctctttgccagtggcccaggccagttcccggtcaccttcttccacctcggcacgtacttccgcacgccggtgcgcatgcacgtgatcgaacgcgccaagggcggccccggcaaggcccgcgagatcgtctacgacgacgcctacttcgacatgccggccgacagccccgcgcacaagctgccgccgggcagcggctttgccggcttccgcttccaggaaagccgcctcggcgaccagaagacacgcgactggcgcaagaacgactgggttgccttcctcggcgcgtcgtatttccgcgccatcggcgacctgtaccagtacgggctgtccgcgcgcggcatcgccatcgacgtggccgaagccggcaagtccgaggaattcccggccttcacccatttctggttcgagacgcccgagggcaacggcgataccgtcacggtctatgccctgctggatggccccagcatcgccggcgcctaccgcttcgtcatgcagcgtggcaaggccgtgatcatggatgtggagtgcgcgctgttcctgcgcaaggatgtgggccggctggggctggcgccgctgacctcgatgttctggttctctgagggcatcaaaggcaccgccgtcgactggcgcccggaggtgcatgactccgacggcctggcgctgtggaacggcgccggcgagcatatctggcgcccgctgaacaacccgccgcagaccacggcctcggcgttttccgacgataaccccaagggcttcgggctgctgcagcgcgaccgcctgttcgaccactaccaggacggcgtcaactatgaacgccgcccgagcctgtgggtcgagccgcgcgacggctggggcgccggttcggtgcagctggttgagctgcgcaccgatgacgagatccacgacaacattgtcgccatgtgggtgcccaaggccccggccaaggccggcagcacctaccgcctgcgctaccggctgcactggcaggccgacgagcccttcccctcgccgctggcgcgctgcgtggccacgcgcctgggcaatggcggtcagccgggccagccgcggcccaagggcgtgcgcaagttcatggtcgagttcaagggcgcgccgctggagaaactgcccttcggcgtcaaacctgaagccgtactgaccgcatctcgcggcagcttctcctacgtcttcacagaagccgtgcccaacaatgtgccgggccactggcgtgcacaatttgacctgaccgccgacggcaaccagccggtcgatatccgcctgttcctgaggctcaacggcaagccgctgtcggagacctggctctatcaataccatccgttccagtcgccggcgggctgaggtgcccacggccgcgcgcctggccctttacaccatattgcgtcgccgtgatgtcaggcgcgcacgagcgggtatgatgactggctacgacagtccaactgcatcagccagcctcacatgatttctcaagagttcgccggcgccgccgagagtggccaggccgcatcgctcccgcgctcggagcgcgcctaccagcaactgcgcgccgccatccaggccggccagctgccccccggcacgcggctgcgcgaggtggaactggccgaatccctgggcctgtcgcgcacgccggtgcgtgaagcgctgtcgcggctggagtccgaagggctggtcgtcaacgagcccaaccgcggcatgatggtcacccagctcgacgccagcatggtcagcgagctgtacgtcatgcgcgaagtgctggaaggcaccgccgccgcgctggccgcgcgccatgccaccgacgtggagatctcgcttctgcgcgatatcgtcgagcgcgacctggccatcgccgacgaccccgaccggctcgcgctgaacaaccggctgttccacgaaaccctgcaccgctgcgcccacaaccgctacctgctgaagacgctgcgctcgctgcatgagtcgatggcactgctgggacgcaccacgctggcggtaccagggcgcgcgcgcagctcctacgaagaacacatctcgctggtcgaggcgctggaaaagcgcgacccggcactggccgaacagatcgcgcgccggcatatccagcaggcctacaaggtgcggctgtcgctctggatccaggaacagtcgggcagttgatctgcccggcagcagtcggccgtatcaggccgcctgggcccgcgccgtgcgcagcgtgcccaggctaagcacggccagcgccaccaggatcagcatcacggcacccagcgtctgcggcgcgatctgctcgccgcccagccatgcgcccatcgccagcgccaccggcgggtttacatagacatagctggccgacaacgtctggctgacagtggacaccaggtacatgtaggcagagaacgccaccagcgaccccgccaccaccaggtagacccaggcccagccggcctgcgcgctgaccgatgccggccacggctcctgccgcagcgccgacagcaccatcagcaccacgccgccgatcagcatctccgcggcaaatgccgcggcgccttggggcagctccatccggcgcgccagctgcgagccgaatgaccagctcgccactgccagcatcagcgccaccacgcccccggtactgacgcggaattccgcccccgcggtcagcaccaggatgcccaggctgccgattgcgatcgccacgtactcataccatttcggccggttgccgaagcaggcactccagaccagcgcgaagatcggcatcgacccgatcatcaccgtggtggcaccggaagaaatcgtctgctcggcaatcgctgtcaggcccatgccgcccaccagcaggaacagcgccggcaccgcgcagttgcgcaacagccgccacgacggcatcggcgtgccccgccacgccagccaggcggccagcagcaggcccgcgcacaggaagcgcgtgcccatcatgaacagcggcggaaagctctccagcgtaaagcggatcgccaggtaggtcgtgccccagaccacataggtgatcagcaggcacagcaggacaagcgggggcatggtcgggaaggcatattgcgaaggcatccacgatagccccctgccacgtcccggccaaacgaaaaggtctggcaagccttgcgaaagttattcacaaagcacgcaagaaccgcgggcaaaacaaaaccggccgcgcctgcccgggcgggcgcacgtatggccggttctacaacgcagcccgcaacgggccacaactactctgctgcaaacaactctttagccgttggcgtagaccacgtgggccttgcgggcctgggtctgcaggcgctcgatcgcgctctggacgaaggcgatggcgcgcttcacgtcgtgggcgaagcccaggctttgcgtaccgagttcacggtcgatcagttcgcgttcgagttggtcagtcagcttgatatcggattgggtgttcatggcgtccttcctttcgggattacccttatggggttttccctgattgtagcagaggaattgtggcaatgcagcattaggtgaaagtacgtatgtgggagagcaaccatgagtgggaaattagccaattcatggcttaagtgccacgttatgcttgcagggaagaacagccacattacgcttgccgaccttccggcatcatacaaagtatgctttgaagcacccgagtcatccccaagcgctcccagccttcgatcttcgctgcacgcataatcgcggcgtaagtaaattcttccccgcttccgagcacggtctcaatcgcgctgaggagccggtttgtttttgcttcgagagcttggtcaagcgacacagctatatacttgtgcggtgacgatttgtggccacagtggcggataatgcgttgccaggaagcgtcggttcacgcccagctgccgacaaaccgtagcacccgagtcggcgcatatgttgatagagcgatatttttctgcaaggcgttcaatttttgcctccagcatgtcgtcgcgcttccaagagggctctacgcgatcgagcaagggcaagagactgcatcctagtgcttgacggcaacggctcacctcgaaagacgctcagaaggctcacttcgcagtaggccgccatggccagtagtccgtactgatcgacgagatcttggtgtggtagatcgccgtggcgttccgatgcagttgcacctgggctcgcacaaactcctggtatggcgcgcacgccgacaattgatgtgcgccagttgccggtggtcggggtgggggaatttgcggctcagagccggtggtcaccgtgggggactttgcctgctgcgcggcggcaaattgcgcttgatacccccgaatcgtcttgcggtcgacgccagtgatccgggcgatctcccgctgacccttgccagcggcgattagcgtagcgatggtggtctgtagatgcggcttcaagacgttcactccggtaacccctctgctttattcgaggggaacaaggtaacgtcctgcctggcgctcacatcacttgaagcgccccttcaggtggggagtttgaggtgaccacaggtgggggaatctggccgaccatcggggcagagccgtcggcccgtggactgcggacgatcccaaacagtggtgcagcgtggccgccggcacggcgtgtttgaccgctgcgagcatttgcgcctggtaggcggaaaaggcatgctgcgccatgtcggtaagctggcgctggccgggaatgaggcagcagcgatcgtagagccatcgctgagcggtggtgtccagcaaagcggtctggctggcgacatcgaacggcttgatgccaaggggctccttgacccattgttgatgctcgtacaacgtcggacttcgttgggcgggcagacaactcttccctgccaacgtcgggatacgcaaatgccgacatctacactttcggagtgtcgttaggggcaaaactgtacgataaatgctcggatggccgcaaaggtcaagctaatggcttgaaacgcgaccgcaacaagggactcggttacaaccgtatcaatctgcagagaaaggacgatccccttcgctttcggatcatgggtcggcaagtcgcatctactggaaccgcagttttgcaatcttgggaataagccgcgtcgccgttcgtttaccttgtaaccgtgaaccctgccttggctgttccgccccatggacaaagactttacagatgatgcgctgcgcgaaatgatcccgagaatgcgccgctttgcgatatcgctaacgcgcaacgacgccactgccgacgatctggttcaggcgtgcttggagcgcgcgctggtgcgtcggacttctcgacaggatgccggcgacttacgcgcctggctgttttcaatcctctaccgtctctttcttgacggccagcgtcgcgccaagcggtatgcactggtgttgtcgctgtttggcgttggcagtgacgaagacagcgcaccatcggccgaagacatggttgtggcaagatcggccctcgagagtttcaacaaattgtctgccgagcaacgcgcgctgttgatcctggtgacggtggaaggcctgagttaccgggaggccgccgatgcgctggacgtgccgatcggcaccatcatgtcgcgcatatcgcgggcccggaagacgctgcgcgaattttccgaaggcagggtcgtccctccctccatgcaggtcctcaaatgaagatgctcattcccaccgaacccgaactccatgcctatgtcgatggcgagctggatgaaacgcggagacggcagatcgagagcctgatagccagccagcccgaattggcgcggcaagctgagcagatccggcaggagtcacagcgattgcgcgcaagcatggagcctccgccggccgatacgccagtacggctcgatccattccgtattcgtcgcgagttgcgcgatcgcatgcggcaccgggtggccgtagcggcgtccctggtgctggccttgaccgtgggtggtatgggtggctggcaaacgcgtgagatcgccttccagcagaactatctgccaatggccgacgcgatgtcggcctaccggctgttcgctgtcagcgacacaccgcagatggtggacgtgaagaccagtgatccacgtcagttgcagacctggctggaccagcatttcgtgcagccggcaccgttgcccgatttctcatcatacggatttcggccggtcagtggtcgcctgatgtcatcggaacagggcacggcggcaatgatcctctaccagaaccagaagatggagtcgatcgtctactacgtacggccgcccggcaatctgctgcatttcagcaacggcgcgcgcaaggaggggaacctgctcgcccagtactggcgtaacggccgctatttctatgcggtggttagcgccaccgatacaccgacgacattgccggtacagcgcgccctcgagccgggcaggatctgaaaaatgttgatggcgacggaataacgaccctggcatgttcgtctgactggaacacaacgcatgactgctccatgcatgtgatctcaaactgaaaggatcgaacatgaaactgaaccactcgctgctggccgccatggcctccttcgccgcactgacgtttgcacaggccgccatggcgcaggaaagcgctgtcacccgagctggcccgatcaagaacatcgtattggttcacggtctctatgccgatggctctagctgggagaaagtcattccgctgttgcaggcgcaggggttgcacgtgacatccgtgcagaacccgacaacatcgctagatgccgatgtcgatgcggtcaagcgcgccttggcgcaggaggacggcccgacgctgctagtggcccactcctacggcggaatggtgatctcgcaggccggtgacgatccaaaggtggcgggccttgtctatatcgccgcacgcgcgccggacgcgggcgaggattatccggcgctgacgcgcaagtttccggcggcgccggcctccgctggactgctatggtcggccgatggctttggcaagctgtccatgcaagccttcttgaacgatttcgccggtgaccttccacggaaggaggccgcgacctactacgcggtgcaacagccgatgggcaaggcgatcacgatggccaagactacggttgcggcatggcgtagcaagcccacgtggtatgccgtttcgaccgaagaccgcactatcaatcccgatcttcagcgattcatggctaagcgcatgggtgccgaaacgattgaaatcccttccagccatgtctcgctgatctcccgccccaagcaagtcgcaaatctgattcttcaggcggccggcaaccagcagggtacccgtgcggcgcaagcgcggactttctcgaaccattatgccgtgactaccgctcgcgacccgtacaccgatggtgtgtgacaccggggaaccgcgcacgcttcagccaccggctttgggcgaccgcattggcggcgcctcgatgctctcgcaggaactggcaccgctcccttaccgctcggtgttcggctggtccggcatagcgccactgcgtatttcggggcgcgtgatcagcgatttcgggggaacgtgatcacctgtttcggcgggaagctgatcgctggtttcggcggaacgtgatcacttcggcgacgctgccgaaatcggtgatcatgatcccgaaacgagtgatcacgttgccgaaacggacgatcaagcagccgaaacgggtgatcaagcaccgtaatgaggccgggcaagggctgggggtgggactgcgcatggactagaacgccggcgatacgctgcttcccttttgcaaggaagcaagctgatgccggccaaccggatgaccatgcgcaagatcaaggaagtgcttcgcctgaagtgggcgtgtggcctttcgcaccggcagatcgctagggcgacgggtgtgagtgttggtgaaccgccccggttttcgtggaggccccttggcttgagtcaggccgacatggcctgctgctcaagttggcaatagtagttggcctcgtgctcggccggcggcacgtatcccagcggtgccatcaatcgatgatggttgaaccaggacacccattcgagcgttgccagttccacggactccttggtcttccaaggtgcgcggcaatggatcaactcagccttgtatagcccgttgatcgtctcggccagggcattgtcgtaggagtcgcccttgctgcccaccgagggctcgatgccggcctcggccaagcgttcagtgtagcgaatgctgacgtactgcgagccgcggtccgaatggcacacgagggcatcctcacgcccgggctgcctggcgtacagggcctgctccagggcatcgagcacgaagtccgttcgcatcgaactgctcacccgccagcccacgatgcgccgggcgaacacgtcaatcacgaaggctacgtacaaccagccctgccaggtcgaaacatacgtaaagtccgagacccagagttgattcggccgctgcgcgctgaactgcctgttgacgaggtccagtggacacagcgccttggcatcgctgaccgtggtgcgcactactttgccacgcaccacgcctcgcaggccatggcggcgcatcaggcgctccacggtgcagcgggccaccgggacttcctcgcgctggagctgacgccagaccttgtcggcgccgtagacctgcatgttggcttgccaaacgcgttcgatgtgggcaccagcgccgcatcacgcttcgcccgtgcgctcaacaatgccggatcgcgcttgctggccgcgtagcggcgatagcccgacggggcgacctgcagcaccctgcagatcggctcgaccccgagggtgcctcggtactcgtcgatgaagtccctcaagacttgaatcggcggtcgagctccgcctgggcgaaaaacgcactggccagcttcaggatctcgttggccttgcgcagttcgcgaacctcgcgctccaaatccttgatgcgttgggcttctgccgtggttgtgcccgcgcgctggccgctgtcacgctcatgctggcgaacccaattcaacaaggtctgcggagtactgccgatctttgctgcgatcgacaccacggcagcccactgcgattcgtgctcgccacgatgctcgaacaccatgcgcacggcgcgctcgcggacctcgggggaaaacttcactgacttcctcatggctccattctctcaacgattggagcctcctcaaaacccggggcggttcatcttggacgctctcgcaggttttatagaatcccaagcattccatgcacagctcgatggaagtatctttctgcaagaggacgtttaatcaatccaattggagatgacatgagtaattcccttgaaggaaaagtcgccgtgatcacgggcggcacaacaggaatcggtctggcaatcgccaaggaattcgttgcggaaggcgctaaagttgttgtgacggcgcttcaacaggaggcactcgacgaagccgtcagggaaatcggcccgcgcagcttcggtgccaaggcggatgcttccagcattgccgagatggacgcgctgctgaagcgagtcaaagccgatcacgggagattggatgccgtcatcgccaacgccgtcgctgacgagcatgcgccgctgggcaagattacagaagaacagttcgacaagatggtcggcgtcaatctcaagggcgtgctcttcaccatccagtctgcgatgccgctgctggagagcgacggcagcatcattcttatcgggtcgaccgcttcagtcgccccacccgctggcatgagcatctatggcgcgatcaaagccgcattccacggcatggtccggtccctgatccaggatgccaaagacaccggcgtccggatcaacattctgagcccgggggcagtagacacgccttccctgcgcagagcgcttatcaaagcggcaggcgccgacatggcggacgccatcgttcaatccatcgcgcaacgaagcccagcgggccgcatcggtgatgctcgcgaaatcggcaaggtcgcggttttcctcgccagcgatgcatcaagctatgtgaacggcgtcgagttgtttgtcgacggcggattgagacaagtttgaggcttccgcgctaagcacggggaccccgcccgctgcctgatcgctaccggcttgccttcgcgaagaggcaccggtagcgcccgggggccatgcctgaggaacgcttgaaggcgctgctgaacgcgctttcagatgaatagcccagcgaacggccaagttccgatatgggcatgacgccctcgcgcaattcatactcggcaaggcacatgcgcaggttctgcaggtaagtcaggggcgggatgcccgcaccagccttgaagcgaatggcgaagctggagcgtgacatggcaacttccttcgccagttggccaagctcccatgcccggccaggctcgcggtgcatcaggcgcaacgccggagcgaggcgctcgtcgctgagtgccttgacccatcccgccacacaaggcccggaagcatcgagatatgaccggatggcctgaacacacagcagctgcgcaagctgccttgttgccagcgcaacccctggtcgctcagagacaagctcctgaacaagttgattcaagagccattgcacgaccgcagcctcggccgaatttccgccgatatgaaggtatggtggcaacacctccgagagcagcttgccacgctcgcggtccaaggcaatgtgagcaccaacggcgaagaaatctagaccatggccgagtgtcaccttgctttctaatgcaccagagaaaagctcacggccatcgacggacgctgtctgcaagtcgctcgccagcacgaaagccaggtcggctggcagcacgaacacgtcgcctctcgtcacctcgcgcggcgcggtcatcccttcgatggtcagccagcaggcacccttcacgacaaccataaacttgagctgcccgggcggagggaatcgcaatgcccacgatcctcccgcagccaggctcccgacgtcgacgcactgcgcgctggccagggtgagaatgtcagtgagtgggtcctcattcatggtgcatgggtggcgcggaggccagcgcggtacgggttttgttctcagctagatttcgacaacgatcttgccgaaatggcgaccggcttcctggtgccggaacgcggcaggcagtgcttccaggggaaaactggaatcgatcactgggtgcactccagccgcctcgatcgcacggatcatctccagctgatccgtgcggctgccgaccacaaccccctgcagccggagttgccgcgccatgatccgccccgtgtcgacacggccggccgtgcctgcgagcaagcccacgagcgcaatgctgccgccggtccggcaggcctcgatcgactggttaagcaggtcggcgccgccgatgtcgacaatgtgatcgacgccccggccgcccgtccattgcctggccgcgcgcccccagtccggctccgccttgtagtggatcacgtggtccgccccgagcgcgcgaagacgctccagcttgccctcggaggatgaggtcgcaatcaccgctgcccccctcgtcttggcgaactgcagcgcgaacaccgacaccccgcccgtgccctggacaagcaccacatcgccaggaccgatgccgccacagcatccaagtgcgcgccacgcggtcaggccggcgcagggcagggttgcggctgccgccagcgagaggccaagcggcacgcgcgtcagggcggccgccggcaccacggcaaactggcgcgcgtacccgtcgacgtgttccccggcaacggcgccatgcttccactgggcgggtgccccttcgcgccagtgacgaaagaacgtccccagcaccaaatcgcccacgcgccatgccatggacggatccgcctcacccccgtgtggcggtcctacctcaacaacttcgcccgcgccgtcggacaaggggatacggccctcggcagtcggcatgcggcccgtcaccacgaggtagtcgtggaagttcagcgagctgccgcgcacccgcaccagcacctccccgggtcccggacgacccggctcctcatcgaatggcaccagttgatcgatgccggcgggccgtcccaggcgtatcgctgtggccatgtctatggtcctgtaaagatcccgggcgtccagccggctgcgcatcaggcacgtagctggattgccttgtactcaagaaattcttccaatccgtaaattccgttctcgcgaccttgtccggattgcttatatccgccgaacggagccagggggttccagcggccgccgttgatgtcgacctggcccgtgcgcaattgccgcgcgacaccgagagcacgatcatccgttccggcccagacagcgcccgacagtccatatatcgtgtcattggcgatattcacggcctcggcctcggagtcataaggaatgatcgtaagtacggggccgaagatctcttcccgtgcaaccgtgctccgaggatccgcgacgaacaccgtgggccggacgaaatacccgtcaccggtgccggccggggcctcgggtccaccggtcacgagttcggcgccttcttcgaggccgaggcgaatgtagctgagcacccggtcccgatgcgctgccgacgccagcggacccagctttacgccttcggcaaaggcacttcctacgacaaacgaatcggctgcctggcgcgccaattcgcgtgcgtggtccaggcggtctctaggcaccagcatgcgagtccatgctgcacaggtctggcctgagttcagatagcagtgtgaaacggtggcttggacggccttcgcgaggtcggcgtcgtcaagcacaatcgatgcgctctttccgcccaactccagcgagatgcgcttgatcgtctccgagccgatcctgctaacctgcttgccggcgcgcgttgacccggtaaacgagaccatgtccacctctgggtgcgctgccagtgcctcaccgaccaacggaccgagacccgtcaccagattgaatactcccggcggcaggccggcctcatgaatgacctcggcaagaacgaaggcattgagtggagcgatttcagacggcttcaggacaaccgtgcacccactggcaagcgccggcgcgatcttctgcgtgatctggtgcagcggatagttccagggcgtgatggcggcgaccacccccacgggttcgcgcacaaccattgagttgccaacgcgcgcttcatagtcaaactgctgtgccagtctcgcgtagtacgcccaggaattcgcgggcgcggcgacctggaccagtgagcaggcccgcagcggcgtaccgacctctgtggcaatcagccgcgtcaacgcgtcaccgcgtttcagcaggccatcggataccttttgcaggaccttcgcacgatcggctgacgaggtctgagaccatccggggaaagccgcacgcgctgcactgacggccgcattcacgtccgcctcggagccggcagggatggtggcaaagaggtcgcccgtgttcgagtctgtcacctgcagtgtcccggcagaggacggcgtcagccaatgtcctccaatatagagagtggtgcgttcgatcatgtaacagtctcacgtcgctcaatcagcatgcggaagatccgaccccgcctgccgccactgagccaggacttctcgcttggcgaccttgccggcagcattcgttggcagtgcctcggcgcgcagccaccagcgggagggcacttcatgccgcccgagcagcgcggcagcatgggcgcgcaggcgctcaggcgtaacggtggtacccggccttaagacaacaacggcgccgacttcctcgccaaggtcggcgtgcggcagtggcacgaccgctgcttcgaccacatcgccgtgttgaagcagacattgctcgacttgcgcgcatgcgatgttctcccctgcacggatgatgatgtctttggaacggccaaccaggtacaggtagccctcggcatcgagccagccgcggtcgcccgtggcaaaccatccgtccggaccggtcatcggctcagggttgcgaaggtagccccgggtcatcgtggcggtgcgcaccatgatctcccctacccccgcgtcgtcaggggcgtcgatcctcacctcggccaggggtagcagcctgccaacacaccctttgggccggccttcgatctctgcgctcgatcctgccgccaggacaccgccagcctccgtcatcccatacaggctgcccacccgcttttgcatggacgggaacgccttctggatcctggcgcgaagatcgtcggacagagccgcgccacccatcgggatcgacctcaggctggtggtatcgaagttgccgaacagttcgtgctccaccacgcgcgaaaccatcgtgggcacactgccccagacgcgcaccctttcctgctcgatgagcctcagcaccgtcaccggatcgaagcgtccctccagcatcaccagggtcccgccggtcagcagggtggtcgtggcgatctggatgcctcccatgtggaacagcggcatggtcagcaggctgatggtccccgacgcctcgggcgcgagttcgtcaggcaggcgcccggtcaggaccagaagattctggatattggcgatgaatgaccggtgcgagatcaccaccgccttggcatcgcccgtggtgccggagctgaacatgataacggcggtctcgtcctccatgtcaggcgcaggctccgggcatggaaacgccgcagtcgtgttgcgcaaggccgcgccaatctcatcgaaggaagtggtcaaccacggcccccggggcgacgccgtcgccctgtccgtaatgagcagcgtcggttcagccagctccgcgcaagcttgcgcctgtgcattgccccacattgcattaccaaggactgtcacgccgccaagacattgcaccgcccagaacacaagcagccactccaggctgttatggcccagcaacatcacgctcgtcctgcggccaatcccctgcgcggccaggaagccggcgacgcgccgtacggcgcattcgaattcccgggtgctcaggcgcagttcaccttgcacaatgaacggacggtctgcccagcggcgcgcgtcgagcagaaactcggccagtgacgtcggacgatatgtatagaccagtgttgagtagttctcaactcttgctctcgcgacctcgcgagaccagcgtcgtggggtgatcataggagtggtaccaatgcagacgactacgttgacgggagtccagccaccaggcctcgacatccggggtcgaggccatggccccacgcggtaccgaccattgaccgggataccccgatgctgatcgcacatcgcatgggtagtagtagaccccgtgcgctggcggcgatcaacacagcggagcgaacaagagtacttcgccaggcgagagatgcagcgcgtaccggattgggcgacgtgatttcgccgaccgggaatcgcgccctacagacgttgcgcgcgcctgcctgccagcgcctgcgcggcttcgtccaggcgcggctggctcacggtcatgccactccagcccacgggaagtacgcgggacaggaactcgacgaacgccttcactttggcgttccggccctgtgctggcgggtagaccgcgtacagggtctgcccgcgcgcgacgtacccggtcaggacctgttcaaggcgcccgactctgacgtcaacatcgaacaggatcgatgggccctggcccagccccaacccggcaagaaccgcttcccggtagttgtcgctgttgtcgaacgccaggttgcctttcacgggcgccaggcgttctccctccggcgtctgaaagagccacgagcgcccgccatgaaagaggtccgcagtcaggcagttgtgcgatgccaggtcctcgatgcgttcgggtcggccgtagcggtcaagatactccggcgtcgcgcaggtgacgcgcaggttccgtgtcagcgggcgcgcgacgagccgcgagtcgggcaaatcgccgccccagacggcaatgtccaggccgcgtccgatcaggtcgtgctgcaagccgtcggcttgcgtgatcttgagattgattcccggatactgctcaacgaactcactgaggcgtggcaccacgtgcagccgcgccacgatcagcggcagctggacatgcagccggccgaccggatcatcgcaggcgcgttccagctcctgttccgcctcctccatggaggaaaggatttcgcggcagcgcacaaaatacgcctcgcccgccggcgtcaaagcaagctttcgggtattgcgcacgagcagcggcacgcgcaattcctgctccaggcttgcgatccgccgggtcagaatggacgccgtcacgccgagctggcgagcggccgccgagaagcctcccctttgcgcaacggcgacgaaggattgaatagccgcgaacttatccactaacctttgctcctgcgcccactactgcactgcactgcgcgcacgacatccaggccaatcagcttcccttgaattgcggcgcgcgccgctcggcgaatgccttgcaaccttcgacaaagtcctcgctcgcgaagcaggcagcaatagattcgtcccaacgctcagtattccagtccgcggatgacctgtccagatcacggtctatcagcttgattgcccggacagtcaggggtgctgcggcggcaatggcggcggccacgctcctggcttccgcagccaggtccccatcgggcacgaccgtattgacaagtccaatgcgcagcgcttccgaagcagagaactggcgtccggtcaggaggatttccttcatgaacgccggcccgacgagcgaacggatcttcgccatactgtcacccggatagccaactcccagctttacagcaggaatgccaaaccgcgccgtttccgatgcgatccgaagatcgcaacaactcgccagcgccagtcccccgccgaggcagtagccacggatcacggccacggtcggcttggcacagtcccagactgcccggtaagcctgcagcgcactgcgctcgaccgtgcgcacggcatcggcctgcgacaagcggctgttgaactcggcgatgtcggcgccggacatgaagtcgcgtccgccgtcgccctcgatcagaatgacccggatatccgggtcaccagcgagcgaatccagggccggcgccacgtcgcgccacatcgagtccgtgcctgcgttgcgacgggcgatattgctgaacacaatccgccccgtcgcaccgtcgcgctcgagaatcaggtgtcccctgctgttctccatcatatggtccggttttcgttacaaagcgccagtcgcgccaggtatccgcatcaaggccgggtcattgctcgtcgtcctcgacctcgatggcgaactcagggcagtttgcccaggcaagcagcacctcctccttcagggccggcggcacatcgccacttcccctgacgcgcgcatagccgtcctccccaacgatgaacagttccggcgccgcccggatgcagttctgatgccctttgcatcgtgccgattcaattcgaattttcatgctcactccgtagtctgtggtcaggttggcgcgctcgcccacgatcacaccacgtgacgctcgcgcaggtccgagatctgttccgcgctatatcccagttccatcaacaccgcttcggtatgctcgcctcgcccgggcgttgccgtgcgcatctggcttggcgtgcgcgacaacgtgtacggctgcgccacgacctttatctcctgaagctccggatgccgcagggatatggccatgcccagatgctgcgtttgccggtcctcgaatacctcgtccatccggtaaatggggccacaggcaacgctcgcctgctcgaaggcccggatccattcggaacttgtcttgcgcctcgtgtattgcgcaagctcgcctttcaacgcctcccggttctttgtgcgcagttcgttgctggcatactcgacccgcccgagcagctccggcgccccgatcgcattgcacaagcgccgccacatctcctcgcctgccgtggcaatgttgatatggccatcggcggtcgggaacacgccggttggcgtcgcagtgggatgatcgttgcctgccggttccggcacctcgccgtccatcagccatcgtgccgcctggtagtcggtcagcgcgatcatgccctgcaacagggaggtctgcacccattgcccacggcccgacacttcacgctcgagcagggccgtcatgatgccgagcgccgcgtacaggccgacaccggtatccgccagcgagatcccggtccgcaacggcggttgccccttttcgccggtgatcgccatcagcccgcccatgccctgcacaatctggtcgtagcctggccggtcggcatacgggccgtcctgcccgaagcccgagatgctggcgtagacgagcccgggattgctgcgctgcaaggtttcatagtccaccccaagccgggtcttcacgcctggccggaaattctccaccagcacgtcagcggcctcgaccagccgctggaggatccgcacgccttccggatccttgaggttgagcgtgatgctgcgcttgttgcgatgcaggttctggaaatccgagccgaggcggtccccgatccagccgtcgctgacgtcaagcgcctgcgggctttcaatcttgatgacatccgctccccagtccgccagctgccgtaccgccgtcgggcccgctcgcaggcgggtgaggtcgagtacacgaaaacgctcgagcgggccctgccgattggaggcactcatgacgcggtactccccatggccgtgccgggcagcgggctgaaggccggcggccgcttgtccttcatggcccgcatggcttcactgaaatccggctgtttcatcaactgccccatcagttcccgggaatcctcgatcgcggcgcccgcgtcgtgccgcatgaggtcggcgtagagttgacgcttggccgttttcacggccaccggcgatgtcgagtccgccaggccgcgcgcgatccggagaacttcctcctcaagggtttcacgcggcatcacgccgttgaggaaccccatggcgcgcgcctcttccgccaggaacacgcgccctgacagcagaatgtcggcactgtgggtcaggcccacgatacgcggcatgatccaggacagcccgaattcggcaggcagccctagccgtggcgttgaggtcgtgagcttggcgcctgccgcggcatagcgaaggtcgcagtaagcggccagcgcgacggcgatgccggcgcaggccccgttgatggcggcaatgacgggcttttgcaggccccaatgccagatcagctcgtgctcgtactccgggcgtacgccgtgacccggcgttgccatcacgtcattcctgaagctttcgagatagtcctgatcggactcacggtaatggtccagcgccttcgtgtcagcgccgacgcaaaactgctggccggcgccggtgacaacaatcacacgcacgcgcgggtcgtcgtccaggcatgacatcagccaacgatactcggcattcatgcgcgtagtccaggaatttccgcgcccggggcggctgagccgaaccaggccgacgccgttgtcgacgctcagttgggtgacatgcagttccacgccgtctccttatcagggtgatgggcattgacgcgcaggtgggcagcgtcgttgccggccgggcctcgcctcagtcggcatcccgatggttcatgtcgcgcagcttgaaagtcgcggttgtgccagactccctgcgctcgcgcaggaagttgaactcgtcgctctcgaacctcaggttcgtaccgagcgtgtggccgacaaagccacgtgtgaactgggccgcgcagcccaggctttccagcgccatctggtgcatggccttgcccgtcaccagggcgtcgcgcgggtgcttggcgatacgtccggcccagttctcaacggtagtctccagttcagccaacggcaccgcgcgattgaccagaccgagccggcaagcctcgctgccattgaagcgctcgcccagtagcatgagttcccgggcaaccttggcgccatacatcaggatctgcgagttcatgtgccaggtattgccggcgagaccaaagcgctgttccgcatggctgaagcaggcatcgtccgcggcaatcgccagatccaccagctccaccaggtagatgcccacgccggtgcaatggccatggacctgtgcgataaccggcttggccgaattctggaacgccatgtagctcatgcccaggcgtcggtcccgctgcaagcgcgttctttggttggggcgccgcggcttgccgccgtccggggttagctccagcccgtacgacttgacggcatcgttgtagtcgtggcctgcgcagaatgagggcccgttccccttcaggatgatgactttgatgtcatcgtcgtactcggcatcccgcagggcggcaaccaggtcgtccatctcatcgaagcgcagggcattgtgcttctccggccggttcaggatcagtcgcgccaccgggccgtccttttccaggatcactgtgctgttcaacgtcgtctccttgttctgtatccgctggggcatccaggcgtcaaaccacccggatacgcacgttctcaggaccacgggcattgcccgcagaccacttgaccgcgccggatatgcgctcaaaattcggaatcgccttgagccattcctcgatggcgacgcgcatttccatgcgggcgaggtgggacccgaggcatcggtgcacgcccaccccgaaggtcaggtgtcggttacgcttgcgatcaagctgcacttcgtctgggttctcgaataccgccgggtcgcgattggccgccggataagccagaatcacccgctcgccagcaccgatgcagcgccccttcaactccacttcctcggtggtgacgcgcgcgatagacagcggcgcatagaagcgaagcaactcctccaccgcagtcgtcctcaacaggcctggctcgttgatcagcgtcgcccggtcggcagggtgatcagccagatggttcaggctggcgttgagagcgttccacgtggtatcggcgcccgcaaggacggccagcagcagactaccgatacggtgcttgcgcgagatcggcttgccgtcgatggtggccagtgcgatatggctgacgaggtcttcgcccgggtcctgctcccgctctttgagcaattgctcaagatccgcgaaggcttcatcgaacgccgccttgcgcaactcctggtcgaagggcccgtacttcaggacccggatggcccagtccatgaagcgctcctgacggtcgtcgggtacgtcgaggaagcgtgtcagcaatgacaagacgaagggcttggagtagtcctcgccaaggtccgcttcgcctttgacggcgacccgtcgcgccaggtcgcgcgcgagactctgtgcgtacggctcgatggctgcaactcgcgccggcgtgaagtagggctcgagcaggtcacggtggatcttgtgatccggcgggtcgctggtcagcggtggcagcaccaggcccgaaccctgcggcggcacttcgcccgcaatttccgcggcccgcgatgagaacactgcgggattctgggcgacatggtggatatcgtcgtatgttgtcggcagccaggagccgccccacttttcgctatgcgccaccggacagccgctggaacggatgtcgcgccacagggcatgcgcctcctgtacatagtggtcggagagaaggtcatagccgtcatggagcagtgcgtgctggttggtgtcggtcacttgggatctcctggaaaatgtcagtacgtttcaacgtgatagcgtccgctggctaacaggcgttcccggaccattggccatgcggatgcgccgtcgccgcgaaggacacccgcgaaggcatcctccacgccggcttccatgcctttgcggccacacaggaacacgtgcgtgagttcgtcctgtagaagcgtcctgattcgcttgccggcggcccggatgccgtcctgcacatatatgcggggcgcgtccggttgacgcgagaagcagaagtagtggtcgacaaaaccctccggcaacccgtcttcctcaccgcagtaaggcagctccacgggacgacggccgccgaagaacagcatcaggctgcctgtggcgccgcgcatgctgcgcaggcggtgctggatgaagccccgaaaaggcgcgacgcctgtgccagtgcagaccatgatcaggttggcggacgcttccatgggcatcaggaacgtatcgcccagcgggccgacgacccgcaccgtttcacctgggaccaggccgcacagatagttcgaacacaggccgcccggcttgcgccgcaccgtcagtgcgacagtgctggtgccccgccgctcgcccgttcttgcgctggcgaccgagtacagtcgctcgatatgcgggcgcccattggcatcgaggccgggcggcaggatgccaatgctctgaccctccaggatgggcatcgcctggttgccgaaatccagcacgatgtgccagacatcatcgtcagcgtcgagtgccgtggcccgctcgcgcaatgtcaccgtcgcgacggctggtgcagcgcggctgtacaggtgcagtgccggcgcactcgccgacgcgggcgcccgcactaggacaggactctcgttggcatcggtctcggtgcccgcttgcatcggcgttggcagatcctgccacgaaagttgctgcgcaagcgtgtacggctgctgcaccgggtaccagtgattgatcgcgcccgttgggcacggggggagacacgcacggcaatggttgcagcgctcgacgtcgaccacgtagttgttgtggtcgtgtgtgatcgcgccaaccgggcaggactcctcgcagctgttacagcgtatgcaaatggccggatcaatcaggtgctgcgtgatcgatgttgacgtgggaagcgtcatggttgctcctgttcgttggcggcgcctgcgcggcgagtaggcatcgcgcgtgacctcatgggcgcacgatggcccgaccgcccgcctccgtggcgcaatgcgccatggcctcattgacctggtccagcgaatagatgactgacgcgaggttgtccagttgcagcttgcccgccccgtggaggtctaccagccgcgcaatgtcgcggcgcacgtgagcggaaccatagagggagccgcggatggtcttctctgtgagcaccagcccgccgaacgcggagatgttcaccaccacgtccttacccggcgcactgacaatgacggcacggccgcctcgtcgggtcatccgtatggcgtcatcgatggattgctggcgcccggcgacttccagcgcgacctcgacgccgcgcccaccggtgagcgcgcgtaccttttccaccagtccggtcccgggctgcagctgatgggtcgcacccagcgaccgcgccagctccaggcgatccgtacggggatcgattgcgatgatcatgctggcaccgctggtacgcgcgccctggatcgcatgcaggccgacaccgccgcaaccgaggatggccaccgcttcgccgacttcgacccgggccgtgttgaccgctgcgccccagcccgtcatgaccccgcagccgagcaatgccgcctgctccagcggcagagagtccgggatgggaacgaccgatgtagccggtacgacaacccgctgtgcaagcgttcccagaccggccatctggaacaccggtgcgccattccatgtaaatcgcgtcgtgccatctgccatggtgccctgcagcatcgatggctgccccgactcgcacaacaccggctggccgtggttgcaatagaagcagttgccacactgggccagcaggctgagcaccacgcggtcgccgagcgccaggcccgacacctgagatcccaggcccacgacgacacccgcgctttcgtgccccagtatcactggcagcggtgtcggcagcactgcttggtacaccgacaggtccgaatggcacacgcctgtcgcggcaatctccaccatcacttcgttatcgtgcggttcatccaggtccagcaactccacctggagttcgcgggccttcaccatcacggcagcctgcacctttgttcgcatcgcgtcgcctcttgtttccggtcttcagtcgcttgaagtttagaggcggacgtccgggcgcattgcgccgtttcacgaagttcttacttgctcaattcgagcaattcctgccctctttgcatcaccagtccaggcgcgcctcgtactgctgcactgcgtcagcacgaccctcgatcgccgatccattcggcatgcgctggcgctgcatatcgcgttttgcgaagttctcatcttcaccggttcctgttggtccggcactgcgccgttcctacacttccgacacgtgaccagggacggcatggtccccgcaatctgcaaggccgtgccacatgaacaaaccactaaaccggaacgccaatccactatgtatattgaaccttccaacgcagccatcccatccgcagccgggaccaacccgcttgcagccaggagcgaactccgagatgtcttcacaaacattgcgcgtcaacgccagatcgcggaatctgaccttcgcaaataccttgcagacgtagacccggcgctgctgctagcgtcgctcgtgcacatcacgcgcgacccatcgctgctcagccgctacgcgcctgaactgaagatgccggacaagggcgatctcatgcctggcgtgaaggtcgtcgaaacgctgaagggcttcgcccaggtcgccaccatcccaggggctatccggcaagagatgatcgagctgacggttgccgcgctggacaagcccgcctccgaacagaccgaatacctgtcgggctacgatctggcgcccgatctgtttctcaagatggcagcgatggtcaccggcgagccgatcgatgccgagtttggcgacatgctgctcgaacaggcaggctttgtgcgcaaccagcccgtgctgccgcagcgcggccgcccgaccgagcgtatcgaactggccatcatcggtgccggcatgagtggcatcgcggccgccatccaggcgaaggaccgcggcttccgctaccgcatcttcgatagcaacaacaaggtcggtggcgtatgggcggcgaacgactacccgggcgtcgcggtcgatacacccgccacgtattactcgctgtcgtacgaactcaatccatcgtggagcaactattacccggtgggctccgagtacctgcgctatctcgaaggcatcgtcgagaagcacaacatcagtgagttcatcgagctcgagagcgaaatcctgaagatccagtggatcgaagaggaccaggagtgggaactgatggtggtcaagaaggggcgcgaggcatctcgggtgcgcgccacagcagtcatgtcatgcctcggccacctcaaccgcccgaactatcccgacctgcaaggccgcgagacgttcaagggcgtatcgattcacgccaaccgctggaagcatgacgtcgatctgcgcggcaagcgcgtcggcatcatcggcaccggagcgaccggcgtgcaggtgatcggcaagatctcgcaggaagtggaccacctcaccgtctttatgcgccagccgatgtggatcattcccaaccaggcgggagacggggatattccgcaaagcaagcgctgggcgcgccagtacctgccgtacttcctccactgggacaggctgaagtcttactggacctatagcgacaaggtcggatatccgatcgttcgcgcagacccagaatgggcgaagacgcacgtctccatctctccagccaacgaccgcctgatgcagttctgcatcaactacatcaactcgtgttttggcgagggaagcgaactggcccggaagctgacgccggactacgcaccgctgggcaagcgaagcgtgcgcgacccgtatgactttgcccccggtggcttctactacgccctgtcgcagccgaacgtggccctcgagaccagcaagctggcgcgtgtggtgccggacggcatcctgaccgtggacggcaagctgatcgagctcgacgtcatcatctacgcgaccgggctgaccctcgactggctgtcgccgatcgaggtggcgggacgcaacggggtacggctatccgacgtctggcgcgacaacaatccgtcctcctacctgggcgggatggtgccgaagttccccaatctcttcatcaactctggcccgcataccggggctgggcatgctggcgggcacaacttcatggcggaggtcgtcaaccactacgcgatggaatgcctgcagttactggtcgaggaggatgcccgctcgctggaggtgacccaggaagcgtttgatgaacacaaccgcaagctcgacgagaagatggcgggggcgatctgggcctgggagcggcgcgcccacacctattacaccaaccagaaggggcggcccatcctcccgacgccatggcgccatgtggacttctggcgcatgacccgcgagcccatgaaggaagccttcatcctgcgctgatgcaatgccgtcggcgccccgccgcccggatgcttgccggcaggcagccctccggcgcggggctatgaaccagtcaaggtaacgggaacttagagcatgaaccgcggtttgatacttgggggcggtggcgtcctcggcctcgcctgggagattggcgtgctccacgggcttgcgtccggcggcatcgacctgctcggcgcaagcgaagtcatcgggacatcggccggcgcatttgccggctgcgcactccttgacccgaggggcattgcgtgggcgtacgcgcggcaggttgctgcgagcgtacaagaggtgccggtcgcctcgtcctctgatgtcatccagaccctgtccgtattgctgacggaatgcgccggcgacgcggcgcgcgccggacggcgcatcggcgagtttgcgctggcggcctcatccattgaggtccgccggcgcctggctgtcgtgcgcgaccggctcgaccgcgatgactggccgtccgaccggctgatgctcaccgccatcgacgtggacagcggcgagctgcacctgcttaccagcgactcgggcatcgacctggtgcacgctgccgctgccagcggtgcggcgccgggcatctggcccgtgatctcggccggcggcaaacgctgggtggacggcggcagcgtatcggtgaccaatgcacacctcgcacggagattcggccaatgcatcgtcatctcgccccggccgggcaacctaaccggcgtcacggtgcagtccgagatcgacgcctgcggcaagcgcgacgacgccgtgctcattgttcctgacgcgagcagcgaagccgcgatcggccagaacaacttcgaccccagccggcgccaggtggccgccgaggcagggagacggcagggtaagcaactcgtccgtgaaatgccggacgcatggcgggtgtgctgatgtagggaacccgacggcggcgggcgtctttcacgcaacaccgcctgggtgtacagaaacttcggggaacaatatgacaaccgaaaacggggacaaggcacccggcccgtgcgcaggattgcgcgtgctggaattcgcaaccatggttgccgggccgttcgccggccagatgctggccgatctcggggccgaggtcatcaagatcgagcccatcagtggcgatcccatgcgcaaggggcacccccagcaccagggggtcgcggctggattcgcgctgttcaacggtggcaagcgaagcatgtgcatcgacctcaagtccccttcgggacaagcgctggcgcgcgagctggcgttgactgccgatgtgctgattgagaacttccgcccgggcgtgatggacggattcaggctcgggcatgagaccctttgccaggccaatgcaaggctcatctatgcgtcaatcaatggcttcggcgtcgatggaccgtatgccgcacggcccgcatacgatcatgtcgtgcaggcgctgagcgggaccatgccgggcatcggcagccaggaccagcccgagcccgtccgcaattcggtcgtcgacaagattaccgctgccaccgccgcacaagcaattctggccgcgctcgtccaccgcgagcgcaacggcggcaagggccagcgggtctgcgtgtcgctgctggacgcctacgccgccttcatgctgccggatctgatggtgaaccactacttccagacgccaagtatcggtgcgcgcgccctgcccaacacctacttcccaatccggacgtcggacggccacgtcatgggccatatcttcaccgacgagcagttcaggaatctctgccggatgtttgaccgcctggacctgatcgacgatccccgcttcgctggtgtgaaggagcgccgcgatcactgtgaggcgatgtgggatgaaatccggcacagcgcgcggcggctcgacacggccaccgtcgagcagcttgccgagaagcacagcgtcccgcttgggcgcgtcaacgacctggccgggttcttcgccgatccgcaggtccggcacaacggcacgtactcggacgatgacgatccattgctcggaagagtgcgtcagcttcggtccccgatccgcctggcgctgacgccagcggccagccgccgccggccgcccctgctcggggaggacaccagcgcactcctcgcgggcctgggcaagacggcaacgcagatcaaccaggcctttgcaagccgggtggtcgccggccgcatggacgaggcggatgccgcaggcaagtccgcggtgggagcacaagcatgagcggtccattgaaaggcgtcaggatcatcgagttcggcgcaatcgggccggcgccattcgcctgcatgatgctggccgacaacggcgcggacgtcatccgcgtggcgcggcatgtaccggcctggcggcaaggcatcatggatgcgagcaaggacgttctggcacgctcgcgccgcgtcgtgcaccttgacctcaagacgcccgaaggtgtgcgcgaggcccgcgcgctcgcacgcgacgcggacggcattgtcgagggctaccgcccgggcgtcatggaaagactcgggcttggccctgaggtcttgctggctgacaacccgcggctggtgtacgggcgcatgaccggatggggccaggacgggcccctcgcacagcgcgccgggcacgacatcaactacatcgcgctggccggtgcattgcacgccttcgggcgcgagggcggcaagccaacgccacccgccaacctggtcgcagactttggcggcggcggcatgttgcttgcgttcggcatggtcagcgccatcctgcatgcacgcgccacgggggaaggtcaggtggtggactgcgccatgctcgacggcaccgcgttgctgatgagcatgatgtggtcgctgcgttccgccggtgtgtggcgcgacgagcgcggtgtcaatctgctcgacaccggcacgcatttctacgagacgtatgagaccagcgatggcaagtacatcgcgatcggcgcggttgagcccgagttctatgcgctgctgcgggaaaggctaggtctggccgacgacccggacttcgaccgccagcgggacccgaaagcctggccggatctcaaagccaggctttccacgatcttcaagacccgcagccgcgacgaatggtgccgcatcttcgaccccaccgatgcctgtgtcaccccggtcctttcgatgagcgaggcgcccgatcacccgcacgcccgcgcgcgcggggtattcacgaccatcgatggtgtcgtgcagcccagcccggctccgcgctactcgcgcaccgtgaacgatgcacccaggatgcttcgccctcaacaggacgatcgcgatgcgatccgccccgggcgtcgcaccgcactgtgcgcaagcgaaccggcaaccgatagctgaggggtaagcgaaatgagcagaattgcattcattggtcttggcaatatgggcatgcccatggccctgaaccttgtacgtgcgggccacgacgtgcagggattcgatatctcggaagccgcactggccggcttcgccggacagggggggcaatcgcagcgcagcgtggcagcggctgtcgatggcgcatcgatcgtcatttccatcgtgagaaatgccgatgacgtgaagaacctgtactgcaccgcaggcggtgtcctggacgtcgccgcgccgggagccctgctgatcgagagctcaaccatcggacccgccgccgcgcgtgctgtcgccgcggaagcggcgcaagccggctttgcgatgttggatgctcccgtggccggcggccaggctggcgcccgcgaagcgcggctgacattcatggtcggcggcgcgcgcacggccttcgaccgcgctgagccagtcctgcgccagatgggcgccagaatcttttatgccggggccagcggcaatggccagattgccaagctgtgcaacaacctgatcgcctgcgtcagcagcgcggtcgtctcggaagccttcatcctgggcagcaagctcggcatggactatcagacgatgtacgacatcatcacacagtctaccggccagtgctggaccctctcgcacaactgcccggtgccgggccccgtgccgtcttcgcccgccagtcgcgattatgtccctggatttgcggcggatctgatgctcaaggacctctccctcgtcgcgtctgccgccagtgaggttggcgccgcgacaccgtttggcgccagggccatccagctgtaccggcagctaagcgaatctggccttggcgcccgcgattggaccgtagttgccaggttgatcgaaaacagcgcttctctcaattaatgctgcatagcccaggagacctctgtgtcagctaaccccctccatcccaatctcaacgcggaagatctggccctggccctgagtgggcacaatttcatcgacggcgagcttgcgcccacacgctcgggcaggacgttcgccgtgatcaatcccgccaccggccgcaagatcgcggatgcgcccttcagcgttgccgatgacgtggatctcgccgtccatgccgcgcagcgcgcccagcgcgaatgggccgatacaccggcgcgcaggcgcggcgccctggtcattgaatgtgcccggctgctggcctcgcacgtcgaggagctggcacggcttgtgacactcgagaccggcaaggcgattcggaccgaaagccgtcccgaagcggaaggtatcgccgacatgctgcagtactacggcggcctggccccggagctgaagggcgagaccgtgccccaccggccggatgtcctgacgctcaccgtgcgggaaccgctcggcgtcgttggcgcgattttgccctggaacgcgccaatgtacatcctggcgatgaaaatcggaccctcgctcgtggccggtaacactgtcgtggtgaaatctgccgaggaagcacccctggcagtgttgcgcgtgtgccagatcctgagccaggtgctgcccaagggtgtcctcaacgtggttgccggctatggccctgaatgcggcgcgccgctggtcgcgcatcccggtgtgcacaaggtcactttcaccggctccgtggaaacaggcaagatcatctacaagacagcggccgacaagctgatccccgtcacgctcgagcttggcggcaagagcccgatgatcgtcatgcccgacgctgacctggatcaggctgccgccggcgcggtggccggcatgcggttcacccgccagggccagagctgctcggcctccagccggatgatcgtgcacgagtcggtgcatgacgcatttgtcggcaaggtgaaggcgctggtcgatgccatgaagattggcgatccgatggacgaggccacggacatcggcactatcatctcgccagcccagtacgacaaggtgtgcggatacatcgaagcgggacgatccctgcccggcacaaccgcggtggaatgctcgacattgccagcagacctggcgctgggagccggactgttcatccgccctgtgatgttcaccggcctgaccaatgatagtaagctggcgcgcgaagagatcttcggtccggtcgtctgcgtcatgaaattctcgagctacagggacgcgttggcgatggccaacgacacagactacggcttgacggcgtcagtctggacccgggatctgaagacggcgatggatgccagcctgaggcttcaggccggcttcgtccaggtaaaccagaatctcgtagcccagcctggcctctcgtatggcggctacaagaattccggcttgggcaaggaggcatcgcttgaggcaatgctggaccacttcacacagatgaagaccatcctcgtgaatctcgcatagcaccagcggcgccgcaggcgccgctctgcctcagaaaatcattaaggagacaccggtcatgaaaaattcgatcgcgctgctgttctgtgcattggtcaccacagtctcgatgccgtctcacgccaatgacagcacgacgccccgtcgcctcatcgttccctataccgcgggcggaggcagcgacacgctttccagggcaatcggccagaagctttctcaggtactgggcgaacctgttgtcgttgaaaaccggcccggggcaaacggctacattgccgctggcgttgtcgccaagagcccaccagacggccgtaccttgcttgtcggcggcaatgcgctgattatcgggccgatgttgtactcatcgcacaagcttaatgcgttgaaggatttcactcctatttccagtctggtcagagtgactcttgtactggtcagtagtccgggccttccggccaacaatggccgagaatttgtccagatggcgcgaaaagagaaaggcctgagctacgcctcgccgtcgccgggcatcatgtttgcgaccgagcaaatcaaggcgctggccggtttcgacctgatgcgcgtgtcgtaccgtggcgcaccggaaggctttatcgatgtgacttctggaagggtatccgtgatgtttgacagcgttgccgcggagctgccaaacatcagatcgggtcgcgccaaggctcttttggttaccggcgaaaaccgccaccctctccttccggacgtaccgacgcttgctgaatctggcatcccaggctacgtagaggacaactatatcggcatacttggtccggccggcatggatccgcacgtcgtcgatacactgaacgccgcattgctcaaggtcctccgagaccctgaattcaaggcctttgcagaaaggctgggatttctcccttcacctgcatctcccaaggccttccgggatatgctcggcgcgaccacaacgcggtaccaacagattgccaatcagctcgacctcaagccggaatagagaagccacatgcattggtgcgaatagcctgacgtgtctgtccccgggcacatcggctcggggccgcgctgggcgcaagccgtgcggccccgaaatcgagcagcatttcgacggtcgccagacagttccagggggatcggtggcgtttagtccacgaggaaacgttcgcacagcagggcccaatacgccgcaccgacagcaatgttcccatcattgaagtcgtagccgggattgtggaccgagcagcctccggcctttccgccttcgccgtttccaagccacaggtagcagccaggcacggcatccagcatgaaggcaaagtcctcactggcggcaatgggcgacgcctggcagttgacgtggctcgcgcccagcaagtccagggcgacctggcttgcgaacgccgtttcggccggcgtattcaccaggactggatacccgcgctgataatcgacctgcgccgtgacgccataactctgcgcctgcgcggataccaggtccctgacacgctgctcgatccgctctcgcacatcgcggtccagtgcgcggacactcagcctgagcacggcgtgcgagggaatgatattggagacggtaccggcctggaacgcgcccacggtaatgaccgccgcttgcagcggatcgacattgcgcgccacgatagtctgcaaggccatcacgatggaggcgccggccacgacagggtcggccgcgtggtgcgggatcgccgcatggccgccgacgccttccagcgtgatggtgacgttgtcggccgaagcctgcgccgcgccctcgcgcaacagcagacggcccgatgcggtgcccggtacgttgtgcatggcgaagacggcatcgcaagggtacttcctgaacagtccgtcctccatcatcttctttgcaccgcccaacccctcctctgccggctggaagataaggttcagggttccgctgaagtcgccgcgccgggcgaggtactttgctgcgcaaagcagcatggtggtatgcccgtcatgcccgcaggcgtgcatcacgccgggatggcagctggcataggggagccctgtggcctcctccatcggcagggcatccatgtcggcgcgaatgccaaggctgcggttgcccgtaccgcgtcgcagccggccgacgacccccgttgtccccagcccgcgctcgacctcatagccccattcggcgagcaggctggccaccatgtcgctggtgcggtgttcctcgaagccgagctccggatgccggtgcaggtcacggcgaactgctacgaactcttcggcgctgtcccgcagcgcggccaggatgggatgcatgtcgtccttattgcggctgcaagccgatggcacgggcaatgccgcggtattgttcgatgctctgctgataggccttctgactttcggcaagcgacaccggcttggacgcaggcaggttcgcggcatccaggcttgcgcgcaccgaggggtcggccagcgtatgcacaatcgcgttgtgcaccgcctgcacgacaggctcggcagtgtccttcttcacgaagatgccagcccaggttgaatagttgaagcctcgcagcgccttgctctcattgacgctggggaccgacttcactgcctccactcgcgtaggcgacagtacggccagcatccggacctggccggtgcgcatgcgttcgatgtcaggcttgccaaatggcgagatgaagatatcgacgattccgccaacgaggtcctggatcacgggcgcgccgcccttgtaagggacgtgagtcatcggcgctccgatggtttgggacatgtgcgcccccaggaggtgatagagcgagccgatgccgacgctggcgtacgtcagtggtttgccggccttggctgcctgcgcggcataggcggcgagttcgtcgacatcctttaccggcagatccctgcgcaccaggatggcaagatcgacagtgccgaccatatgcaccagcctgaaatcttcgctcctgaatttgattgcggcattggccagcggcgtagtgatgagctcgccgggccctgcctgcaatagcaggtggccgtcggccggtgcatgaaggaccttctgcgcggcaatcgcgccaccagctcccccgaggttctcgacgatgactggctgcccgaactgccgggccagggacccgttcaggttccgggcaacaacgtcggagaggccgcccgccgggaacggcaccatcagcgttaccggccggtcaggaaagccgtgtgccggcgccagccctgcaaaaagcagtgctgcaaccaggccgccgagccaacggcggccaatgttcttgaatcgggtcatggcggtctcctcaatgcgtgttcttgtggaatcggatcgtaaagcgccgtccggcatgcgtccaatgcattatcggtctaaaatttattcaaaaatctcatctataagtgcgcaatgcatctcaaacatctcaagcatctgctgatggtggcggatatggcgtccttcagccaggcggcacaacgcctgcacctgacccagtccgcgctgagccggagcatccagacgttggaggacgaactgggaggccgcctgatcgaccggcacggcaagcgcaatgtgctgaccccattgggggagctgactgcaaaccgggcccggcgcatcgtgttcgaggaagcggaactgcaccgcagcgtcgaactgttccaccaccaccacctgggtgccatccgcgtcgggctgggcgcggggccgggcgcagtgctggcgacgccgtttctccgatacatggccaggcaccatcccggcatacaggtcagcgtgtcgcttggtacttccgatgcgctgatgatccagctgcgtcagcgatcgcttgatgcagtcatcgtggaggtgagcagcgtggcgccagcaacggaccttcgccacgaactgctgaacgcgttgcagggccgctttatctgccgcacaggacatccgcttgtgcaacaggctgccggcggagacgccgtatcgtttgacgatgtcatgcgttatccgctggcttccgccccgctcagcacggaagtcgcgcgcaacctggtgaagcgcttcggtccacgcgcggatccggagcattgccttagcctcaggtgcgagaatgtccggagcctggtcgaagctgtgctggattccgacgcgatactgttcagcatcgtcgccgcagtgcgtgcggagattgccgcaggaaaactatgcgaactggtcacgaccccagcggtcgatgatggcccccgctatgcctctttcaccctggcggggcggaccgaggcgcccagcatggaaatattccggaaattcacggacgagcatttgcgtgactagccgccaggcgagctgttcccgatcggcagcgttatgcttgaatccattcagggcaatgatgtgccttgtcgatgcacaataagagttccttggatcacccaacctccactccgagaccggtaccggagccgtcccgtgagttcccgttccttattcaaaagcggatgccggtatgccaaggccccagatcctgacctatgtcgacgccggcgcttccgactggaccgcatgcctgatgcggaccatcgggcaccaactccacgccagcacctacgagaaccgtgcggtgatggcagacgacatccggcacgacgccacgctgttcgatggggcggtgctgtttgtcttgccgggaggcgccgaccttccctactgtgcaatgctgaacggtgccccgaacgcgcgcatccggcgtttcgtcgaacagggcggcgtctacctcgggatttgcgcgggcgcttactacgcatgtcgggaactggcgtttcacgccggcaccaggggcgcaatctgcggcccgcgcgagctgtgctttgtcgacgccgtggcagtgggctcgctgccagaactgactgacggcatgctgtatgacggcacgccgcgtaccacggccgcggtgaaactgcgcaccacggacagcctgaccgatgtcccgatgtcgctatacacccactaccatggcggctgccgctttgacttcggcgacgctcccggcgctgacacgcaggtcctggccgtctatgcggatatcgatggcacgccgccggccatcgtcagttcacgggttggcaagggccgcgcggtgctcgccggcgtccaccttgagatctccgagcgggagtgcaaggatgcgctgcgcggacacagcgatatgcgtgaacacctccatgtctgcgaccggctggcggagaccggcgatacacgcctggcggtgtttcgccggttgctggcgcacgcggggctggtgctgaactgagcggcgcgccctaccctttggccggcattcttagtgaattcacacaatgttgaccagccgcgtccccgccgtcaggaacgtgcctgcggccgcctgccacgttacgcggccgccgcgatgagcatggacttgcatctccatcttcatggcttccatcacggcgatcagatcgccttccttgacctcgtcgccaactgcgaccttccaggtctgcacggtgccggcgatcggggatggcaggtcggccgggtcagtagcggcggcctgggccggcgccgcggcgctgccttgcccgggcgcgtcggcgaggccgcgcagcagctgcgccggcagccccagcaccatgcggcggccgtcgatctcgatggcggtgcgcaacaggctggcatcgtgccggggctcggcacgggtggccgctgccagcggttcggcgaagtcggactcgatccagcgcgtgtggaccctgaagccatccgcgccgaggaaatctgcgtggtcgatcaccgcacggtggaacggcagcaccgacgccacaccctcgatacggaactcgcgcagcgcacggcgtgcgcgcgccagcgcctgttcgcgcgtggcaccggtcacgatgagcttggccatcagcgagtcgaatgtgccggggaccaccgagcccgactgcacacccgagtccacgcgcaccccggggcccgacggagcttcgaaggtctgcaccggcccgggcgtgggcaggaagccgcggcccacgtcctcggcgttgatgcggaactcgattgaatggcccagcggcgccggggtttcggtaatggagagcggcaagccatccgccacgcgcaattgctcgaccaccaggtccacgccggtggtctgctcggtcacggggtgctccacctgcaggcgggtgttgacctccaggaaggagatcgcgccgctggcgctgagcaggaattccacggtgccggcactggtgtagctggccgccgcgcagatgtcgcgggcggcggcgtggatacgcgcgcgctgcgcgtcggtcaggaacggcgcgggggcttcttcgaccagcttctggttgcggcgctgcagcgagcagtcgcgcgtgcccagcaccacgacattgccatgctggtcggccagtacctgcgcttcgatatggcggggcttgtcgaggaactgctcaacgaagcattcgccgcggccaaaggcagtgacagcctcgcgcacggcggaggcgtacaactcctccacctcatccatgcgccatgcgatcttcatgccgcggccgccgccgccgaaggctgccttgatgatgatcggcaggccgtactgctcggcaaaggccagtacctcactggcatccacgaccgggtcgggcgtgccggcgaccagcggggcgccaacctgcaaggcgatcttgcgcgcttccaccttgtcgcccagccgcgcaatcgtggcgggagacgggccaatccagaccaggccggcatcgatcacggccttggcaaaggcttcactttccgacaggaagccgtagcctggatgcacggcatctgccccgctgcgccgggcgatatcgagcagcttgggaatgttcaggtaggtgtcggccggacggtcgccatccaggccgtaggcctcgtcggccagccgcgcgtgcagcgcgtcgatatcagcattggcatacacggccaccgacccgactccgtagtcggcacaggcgcggatgatgcggacggcaatctcgccacggttggcaatcaggactttcttcatcgcaaatctcggttggggcttgtgcgctcaggcggcagacgatcgctgcgccgacagttgcagttctgacggttgaagttcttcgaaggcgccgagcgggttgaagcgcagccaggcgccaaccggaatctgtccggcgcggtccaggtggtaaggcgccacggccccgatcacggggtagccgccggtcagcgggtggtcggccaggaacagcacgggttggccgcttggcggcacctgcaacgcacccagggcggtgccctcgctgggcagctcgccggtgatggcgcgctccagcggcacctcgccggccaggcgcaggcccacgcggttggattgcggggtgacttgccagcgctgcgcagcaaggcgcgccacggactccgcagtgaaccagtcggtgcggggaccgagcaccacatccagcacgacgtcctgctccaccgtgggcagatcggcggcaggcaacccgggggtgcccacgacggcgccggccggtgcgggcagcaggtccagcacatcgcccacggccagtggcgcgggaccgaccttggccagcgagtcagtcgcacaactgcccaggaccggcgtgacggcaaacccgccgcgtgctgccacatagctgcgggcgccggcaagaggctgaccgatgctcagcgtgtcgccatcggccagcgccacggcctggtggttcgggacgctccattggcgaccatcggcagtgcgcaccgtcagcgccgcatcggcgccagtgacagccagcacggtttcacccacgctctgcagttgcaggccgccgcccacggtctcgagcgccgcgccgtcgctgcggttgccgaccaggcggttggccatcttgagggcggcctggtccatcgcacccgaggccgagacgccctgccccgcctggccgtgccggcccaggtcctggaacacggtctgcagcccggtggccctcaccttcagcgccgcggcagcagccgccttgtccgtcggcaacggctggcgcgccggggcgccggcggcgatggcgctgcccgcatcgagcacgccatcgagcgtggcgatgtcgatgaagcgcacgcgatagccgggctgcagcagcgcaggctgttcgcgattcaggtcccacatggccacgggggtaaccccgatgatctgccagccgcccgggctggcctgcgggtacacgccgctgaaggtgccagccaggcccacggcgccggcgggaatacgcgtgcgcggcgtactgcggcgcggcacgtcgaagctgggatggccgccgctgagataggcaaagcctggcgcaaagccggtaaaggcaacggtgtattcgctgccggtgtggcggcgcaccacttccctgggcgtgatgccaagcagctgggccacctcggccaggtcctcgccgtcatagcgcaccggaatctcgaccaggatgttgctgcgctcgacgcgctgcgacaggtcgcgcgcggcgatggccgataccagcgcggcggcgctgatggccgatgggcggaagtgaacgaggatggtgcgcgcggcgggcaccagctccgccacgccgtgcacgggatcgcgctgcagcgaggccagcagggccagggtctggtccaggtcggccagttccaccagcagtgcattcgaagtgacgggcagaaaacgcaaaacgagctccgcaatgacccggaggtcctagacgtgatacgtgctgtctggcacgtcggtaatgaacatgtggcccggcgcatgcgtcacggcgaacggcacgcctgacgccatcacggccgcctggggcgtgacgccgcaagcccagaacaccgggatctcgcccggctcgatacgcacggcgtcaccaaagtcaggcctggcgaggtcggcaatgcccagcgcggccggatcgccgacatggacgggcgagccgtgcaccgacgggaagcgtccgctgatggaaaccgcatcggcaacccgatgcgcagggatgggccgcatggacacgaccatctcgccatgcaggcggccagccgggcgacactggcggttggtgcggtacatcggcacgttggaaccgtcggcgatatgccgcacctcgatgcctgcctcttgcagcggcgtctcgaaggtgaagctgcagccgatcaggaaggtgaccaggtccgggtgctcagtccacaggggcgtggcatccgccacctcctccgccagcttgccgtcgcgccacacgcgatacagcgggatatcggtgcggatatcggccccttgcgccagcacggtctgctgtgcacccgcttcgatcacgtcgagcacgggacaggccttggggttgcgttgcgcgtacagcaggaagtcccaggcccagtcgcgcggcaacgcgatcatgttggcttgcgtcatccccggtgcaatgccggcggtaggctgtaccgtgccggcacggtagcttgcgcgcgctgcgcgcgcggcgttcacggcggcgatgcgggtgcgttccagtgcggaatcttgcatgcgtgttgctccagtgtcttggatcagatcaatgcgcggcctcggccccggcttcggcgagcaattcgcgcccttgcgtttccggcaacagcaggcaggcgataacgaccagcccataggcgccggcggcgagatagccgatggcaacccccagcgacatcgatgcgctcatatgcccgatcatggccgggaatatggaaccgaccgcacggccaaagttgtagcagaagccctggccggagccgcggatatggctcggatacagctccgtcaggtaggcccccatccccgagaagatcccggacaggaagaaacccagggggaaacccagcaccagcatcgcggcgtcggtgatcggcaactgcgtatagcagatcacgaggaaggccgcgctcaccgcaaacagcatgaagcaacgccggcgccccaggcggtcggacagccaggcgctggtcaggtagccggcgaaggacccggcgatcagcaccatcaggtagccgctggtgttgagcacggagagattgcgttccatcttgaggtaggtgggcagccaggtcgtcaccgaatagtaggcaccttgcatgccggtcgccagcaggcttgccagcaccgtcacgcgcagcacgccgggcttgaagatcagcatgaagttattgctttgcccggtgcgggccagcttggccctggtttcctgatacacctcgggctcggagatattgcggcggatatacaggataaagaccgccggcagcacgccggcccagaacagcacgcgccatgcgtattgctgctcgaacacggcatagaccgcccagaatgcaatcgccgacaggccccagccgatggcccagctgctttgcaccagtccgaccgccttgccacggtggcgggcccggatcatctcggcgatcagcagggaaccgactgaccattcgccgccaaagcccaggccttgcagcatgcgggtcaggaacagttgctcgggggactgggtgaagccgctcaggaacgtgaagaaactgaaccagagcacggtcagctgcaggatccgcacgcgaccatatttgtcggccaggatgccggccagccagccgccgatggccgagctgatgagcgcgcccgtcgcgatgtagccagcctcggccttggtcatgccccacaccaggatgaaggtggggatcatgaaggtgtagatcatgtagtcgaaggcatcgaccccatagccgacgaaggcggcaaagagcgtcttgcgctccgcctgatttgtttctttaagccacatggttgcgctcactatggataaggacaaagcgtggacaaggctcgtcgcgatgtcttcacgacgaagttccggtagcgagcaagaccactaagacagcggccccgcaccccagccgctgtttagcaaaacacatgccatgttcatctatctgcacgtatgactcaaccaccgtgacatattgttgaacaatattggctgaggttcgattctcgtatacacctaagtcacgtctgcagggcagacttcgcaccaatcttgtgcctattgttcaacaaagtgagataacatcgccgcacggggcatgcctgaacctgtcgcccctgacgcaagccaacatgacatccagtactgacgtaagaaacctggccgagcgggtcacggagcagattcgccagcgcatcgtgcatggcgaattcgcgcccgggcagcgcttgtcggaagccgcgcttagcgagagcctgcagatctcgcgcaacaccttgcgcgagacctttcgcgtgctgaccaaggaaggcctgctcaagcacgaacccaaccgcggggtatccgtggcaattcccagcattgcggccatcatcgacatctaccgcgtgcgccgcatgatcgagtgccaggccatcgcccaggcctaccccagccatccagccaggaagcacctgcgcgaagcggtggaaatgggactgcgctgccgcgacagcggcgactggcaaggcgcgggtaccgccaatatggagttccatatggcgatcgtggaactggccgacagcgagcggctgaacgtgatgttcgcccacctgctggccgagctgcgcctggctttcggcatgctgcaggatcccgaattcctgcatggcccatatgtcgagctgaaccagcacatcctgcagttgttcgaggcgggcaagctcgcagagtgtgccgcagccctcaacgactacctggtgcagtccgagcgcatcgtgctgtcggtttgcgcccggcacccgattttcaaggggcgttgaacgccggtgcggcgcatccatgcatagctgctgcacgccgagccgcaatggcccccgcctgctcaagatgcggagccatgcattgtcgtcggtaaggcgccagtgtcctcacttcacggcaagcgtaaacggcagcagcagcgcattcacaagcagcaagccatagacgaccaccgccgccgccgggatggcgaaacgcgtccgatcctgtgcgcgcgcggcacggcgcgtccacaggaaccccgcacccatcacgaccagtcctgaaagcaggctctccacggcaagggctgccggatgggacttgtccgggcggctgttcttgttctcggcaacgggaggcgctgtggcttgccagacaggcagcgtttcaacagccggagccgtcggccgtgttggttcgacgggttccggtccagccgcctcggcaagcggctctgccggcggcggctcttcttgcacgcgctgcgtcggcgcagggatctgcgttgaggtctgcgagccctgcgcggaagacaccgcaggcggcggtgccgcctcctggctggcgggtggcgacaccgccgttgctgcttgattcgcggagtcggaccggcccggtgcgattcgcatcgaatcccgctcccgccagaatttcgcgaacatgctttccaggcagcgcaccgagccgcacgcatcgcgccggccgcgccacgccgcgatgtccgagtccaggatcctgcccttgcgcagcatcctctgctgctcggcgtaaatgcgctcgtagcgctctgacagcctgggggaatcgcagatcagatgccgcgggcgcgcctgcggaccggcctcgtccgtcgcaaggctgcatctcaccccggagccatccggattgttgcagcgtacgggggattcgcgcgcaattggcttgcagacgatgtcagaggcccacgcgccgcttgcggcagtaaggcccgctgctacacccacggagacaatggtggccaggcgccctgtgatcctcttcatcatgatgccccatcaaagcggcccaaggctttcaagctagtcgatagttgccgggtattccaggcacgcaatgcggggcgcgcgcggtaagccaccttgcccggcaccgacaggtccggatgcgtcgcgcgatgaacaatgcattgcgaagccgcagcaacttctcacgccgcgagatttcatggcattctcgataccctccgacacagcctcgccttcgaaaatttcccgagcggaatcatgcacatcaaagcgaaagagactctcatggacacttccaggccttccagccagcgccgcaacctttgttcgatcctgggcatttccacgcccatcatccaggcgcccatggccggtgtcagcacagcggccatggctgcagccgtgtcagaggccggcgggctgggctcgctcggcgtcggggcaatggatgccgaagcggcgcgaaagacaatccgcgagacacgagcgctgaccggcaagccattcaacgtcaacctgttctgccacgcccccgccaaggccgatgaggtgcgcgagcaggcctggctcagctaccttgccgcccagtttgccgagcacggcgcgaccacacccgccagcttgcgcgagatctacaggagtttcgtggccgacgacgccatgttccagatgctgctggaagaaaagccagcggttgtgagcttccattttggccttcccgccaagcagaaaattgacgcgctgcgcgcggccggcattgtgctgctggccagtgcaacgtccctgcatgaggcccgccagatagaggccgccggcgtggacgccatcgtcgcgcaaggcattgaagctggcggacaccgcggcgccttcgacaccgatggctacgacgaaggcctcggcacgctggctctggtgcgtcttctggtgctgggcacgaaacttccggtgattgcctcgggcggcatcatggacggggcaggcattgccgcggtactggctctcggggcagaagccgcccagcttggcaccgcattcgtcgcctgcccggagtcatctgccgatgccgcctatcgcgcggcgctgaccgcgccccagccgcgcgcgaccacgctcacccgcgccatatcgggccgcgcggccaggggcttcaccaaccggctcacggcactcggcgccgccgccgacgcacctccggtgccggactacccgatcgcctatgacgcgggaaaggcgcttcacgccgctgccaaggccgcggggagcgctgagtacgcggcgcagtgggccgggcaggcagcgccgctggccaggtccctgccggccgcggagctggtggcgcaactcaggtcggagctcaggcaagcgatcctgcgcatggcgacgtttgcggacccgcaggacgcagcctgagcgtatctataacaattatttgaatgtactgactgccggctctacgatggcgcaacccaacgtcgccactcccacgaggccccatgcatatcgccatcctgaccttcgaaggctttaacgaaatcgactcgctgatcgcgctctccatcctcaaccgggtcaagcggcccggctggcgggtttcgatcgccagtccggcggccaaggtgcgttcgctgaacggtgtggtgatggaggcgcaagcatcgttggaggacgcatgcaacgcggacgctgtgctggtgggtagtgggatacgaacccgggaagtcgtcgccgataccgcgctgatgtcgcaactccgcttcgacccgacgcgccagttgttgggcgcgcaatgctcgggcacgctcatactagccaaactgggcttggtgaacgacgttccggcctgtacggacctgatctccaagccatgggtagtggaggcaggcgtggctgtgctcgatcagccgtttgtcgccaggggaaacgttgcaaccgccggcggatgcctggcgtcgcagtacctggccgcctggttcatcgcccgtctggaaggcgtcgaggctgcacgcaacgcgattgactatgtggcgccagtgggcgagaaggtggcctacgtgacgcgcgcgatggcgaacattgcgccgttcctctgatgtgcgccccggtcgagccggcgcgccagctaagcctgtagccgcaattcctgcagcagcgtcggtaccagctccgacaccgtcggatggatgtgcatcgcgcggctgatggtggtatagggtgccttggcatacatgatgtcgagcagtgagtgaatcacctcgtcgccggtcacgccgaggatcgcggcgcccaggatcatgcgggtatcggcgtcgaccacgaccttcatgaagccctggctctcgcccttctccacggctcgcccgacgcggctcatggggcgagagccgaccagcagcctgcgtccggattgccgggcttctgcttccgtcatgccggcgcggccgagcggagggtcgatgaacatggcataggctgcgatgcggtccgtcaccttgcggggatcgttgtcgagaaggttggcagcgacgatctcatagtcgttgtacgacgtatgcgtgaacgctccgcggccattgcagtcgccaagcgcccagatgccggggacattggtgcgcaactgttcgtctacctggatatagccgcgggcgtcggtctccacccccgcctggtccagccccaggtcctccgtgttgggcacgcgcccgaccgccagcagcaggtgcgagccgtggacgtcgcgcgccccgtccgaacaatccagcccgaccgcaatgtggtcgccttccctgcgcgcgctcaggcagttggcattgagccggatttcgatcccctcgcgctccaggatctccagcaccgcctgcgacacatcctcgtcttcgcgctggatcaggcgcgagcctttttcgacaacggtcaccctggccccaaaacgccggtacatctggccaaactcaaggccaatgtagctgccgccaacgatgatcaggtgctccggcaggaaatccacctccatcatgctcgagttggtcaggtacggcacctggtccagcccgggcatgggcggaaccagggcccggccgccgacgttcacgaaaatccggtcagcttccagcagttcgccgttgacccgcacgctatgcgcgctttcaaagcgggcatgaccttgatacaccgtgacgttctccagcccgcgcatccactgttccacaccgttgctggaacggccggagatctcgtccttgcgtgccttcacctgcttcatgtcgacggcgaccggcccgccgatggtcacgccgtactcggcagcccgccgcgccagttgcgctgcgtacgcgcttgcgatgagggttttggtgggaatgcagccggtgttcacgcaggtgccgccaaaacgcgcgcgctcgatgacggccgttttcatgcccgcgccggccagccgcgcagcgagtgcgggaccggcttgtccggtgccgatgatgatcgcgtcgaatccttgagccatcacgattctccttgcctggtatcgcaaagccacaaggtactttagatggtgcgacgctgccctgccagctacgcgtaggcgtcgacgccccgcaccagcagcctggccagccgaggccgtcgcaactgctccagccaccattgcagcgcgcggccttcgtgatcgccgcgccagcccacgtagagcaggttgggctcgcgcgggtcggcggtgcgcttctctatcagttcgccgcgctgcagcagcgagccgacccggtgcctgggcagccagccgatccccaggccatcgcgctgcgccagggtcttggctcgcacgctcggcacggccagcaagcgctgaccacccaccatgccgtaagcgcggccgcccgtgaggcgtgatgaatctgccaccaccacggcacgatggcgggcgatctcctcacgtgtcaatggttcgcgcgcggccgccagcggatgccggggcgagaccgcaaacacccattcgatcacgcccagctcgaaccaccccaggttggggatggcgggcggctcgttggtggcaccgatgaccagatcggcgcggccatcccgcagcgcttcccaggtgccggccagcacttcgtgtgtgacgcgcagcgccacgccggattcctgcgcgtcgaacgcatgcatgacgggcatcagcgtctcgaattccatcagctcgtcggtcacgatccacaaccggtcttcccagccattggcgacctgccgcacgcgctgtgtgacgcgcgcgacatcctgcgcaagccgggcggcttcttcggtgagcaattcgccggcgcgcgtcagctgcaggcggtagccgcggcggtcgaacaagagtgcatcaaagcgctgctccagctgccgcgcggcgtgcgacaccgtggacggcgccttgcccagcctggccgccgcgcgcgacaggctgccggcctcccggatggcctccagcagggccaattcgtcctccgacaacatgtgcaactccttcgaacgtgttcgtcggattgatcgtatggcaaaccggaggccagcgcccatactccagtcacgcaattgttcaaattcacctttcccgattggaggacatcatgaatcgcttcgaaggcaagaccgttctgatcactggcggcaacagcggcatcggcctggcggctgcccaggcattcgcccaggaaggcgcccgcgtggtcatcaccggccgcgacgcagcggcactggagggcgcccgcgccacgctcggcaacgaggccatcgccatccgcaacgaaaccggcaccgtgcaggccgcgcgtgacctggctcgccagctgaccgacgcaggcatccgcctggacgccgtcttcatcaacgccggcattgccaagtttgccgccgttgccgatgtggacgaggcactgtgggacgccaccttcaacgccaacgtgaagggcgcgtacttccagatccaggcgctgctgccgctgctgaaccggggcacgtcgatcgtgctgaacggctcgatcaatgcgcgcatcggcatgccgatgtcttccgtgtatgccgccagcaaggcagcactgatctcgcttgccaggaccctgtcgggtgagctggtcagctcgggcatccgggtaaatgtggtcagccccgggccggtgacgacgccgctgtacggcaagctgggcctggaagccgacaccctgtcggccactgccgcgcagatccagagccggattccgctgggccgcttcggcctgccggcggagattgcgtcgacggtgctgcatctgtcggcgcccgaatcggccttcatcgtcggtacggaaatcatcgccgacggcggcatgagccaactgtaagtcaatgcctctgcgggccgcggcgtgggcgcggtctgcgcatgaggtggcccatcctgcctggagcagcttcatgaaccaatccattgcctttatcgtccatctgccgggcaagcccgagcggcgcgctgagctagagtcgagactgcttgatgtcctcgagcagatgtcgaaggagccggactttatcaacacgtatctgcaccgctcgctcgaagatcctgacaccctggttctctatgagaactgggcctgcagcgagcagcatttcagggaccaccacctgaaagcgtcctaccggcgcgaatacgaggcggtgctggccgatctgctgaaagcaccacgcacgccggagtttctaacgccggcgatgtctcgccttgtgccagcgtgccggccggatcttcacgcttgatcagcgccgagaaggcattttcgacatcctcggtcgcgcgcagcacagtctgacggcatagtcatgtcgtgattggtgatttccatgaatgggcgaaggctgctcagccagccgtctggtgcgcagcgcgctggcgctcatagacctgcaggtggcaatatgccgcacggctcaacggaagctcatgcccgtacccggctgcgcgcttgatgagatcgccgacgatggcgtcggcttctatgcgtggggcgccccgcgctatatcccgcatcatcgaggcagcccaggtcgatgcttcgtccagcagtcgggcctgcatggcagcgacaacgggttcagggatggcatggccgtacagttgcgccaccgtgcggcactccgcaatcgcgtcaagcatcaggcgacggccatcctgggtcttcatgatgtccgccacggtcccgcgcatcaggcatgtcatcactgcgccggcggcaatcatggcccacttgttccacagctcctgcccgatggcgcccgatagctcacgcgtaccggccgccctggacaccagcgcatggaaatccgcggccaatgccgacccctgcgcggcgcgcgggccgactaccagccggtccatgcggccggcgtgcacgacggttccatccgccgccagcgttgtcgctatgtatgcgactccacccagcacgcgttgcctgccaaagcactggtcgagccggtcataggcgtcaaggccgttgagcagaggcaataccgcagtgtcccggccaacggccgggctgatggcccggatcgcgtcggcaaggtcgtaggccttgcatgccagcagtaccacgtcgaactgcgcgccgacctgaccggccaggaccatctttaccgggcggtggaagtcgccaagttcgctacgcacggccaggccaacccgttccagcgcccgcgcgcggccgggccgcaacatgaaggtgacatccgcgcctgcctcgatcaggcgcgcgccatagtagccgcccatgcccccggcaccgagtacaagaatcttcatgacgcctctgcctgcgcggcggctgcggggcggcactggacgatcaggttgccggtgaaaacctgcactggctcgtcggcctggttgaaggttgtggtacgcaccttcaccacgccctggtcggggcgcgatttcgaaatccgcacttcaagtatctcgctctcgatatgcagttcatcgccagggcgaaccggccttggccagcgcagctcctcgaagcccgcgccgacgatgccgcccgcgggccggaattcgccgtcgaccagcaggcgcatcgtcagcgcagcggtatgccaaccgctcgcagccagtccacgaaacagtgtgtcgcgggcggcggcttcatcgagatggaagggctgcgggtcgaactcggcagcaaaggccttgatccgttcaggcgcgacggtcagccgccccgaaccgtatcgttggcccgccgcgagatcctcgatgtattgaatgttcattttctcctccagatggtttgtgctgaactttgcatcaatgcacgcccgctacgagaacagacggatcaggccagcgtctcgagcgccagcgcaatcccttgtccgccgccgatgcacagcgtgacgatgccgcgccgtatgccgtcggcgcgcatggcatgcagcagccgcgtcgtcagcaccgcgccggtcgcaccgatcggatggccgtgggcaatggcgccaccgtcgacgttgatgatgtcgtgcggcaatccgagctccaccgcgacagccagcggcaccgcggcaaatgcttcattgatctcgatgcgttcaatgtcgcccagctcccagccggcgcgttgcagcgcctgccgcaccgccgggaccgggcccagcccgaacatgccgggctccacggccccgacaccgtaagcggccaatcgtcccaacggctgcagccccctggcttcagccagcgcacgttcggcaatgatcatggccgctgcgccgctgttgagcccgggcgcattgccggcggtaatcgtgccgtccgggcgaaacgccggcttgagccggccgagcgtatcgaggctggtatcagggcggttggcttcgtccacttcgaacatggccgtaccgcccttccctttggtcgccaccccggcaatctggccggtgaatcgcccgttcgcctgcgccagcgcgaaattccgctgcgaacgctcggcccagcggtcttgggcctcgcgggtcagcgcgtagcgggcgacaaggtcctcggtatgccatccggagtgctcaccggagaaggcgtcaaacaggccgtcgtgcagcatgctgtcgtacaggacggaatcgcccatgcgttgaccccagcggccggacggcatcaggtatggcgcgcgatccatgttttccatgccgccggcgatggcgatatctacatagccgagccgtacctcgtccgctgccgtggcgatggcctgggcccccgagccgcaaacgcggttgacggtcatcgccggaaccgaaaccggcagccctgccccaatggcagcctgccgggccgggttcatgcggttgccggcctggatcacatttccgaacaccacgctgccgacctcgcctggatcgattcccgcccgtgccacggttgcccgtatcgctgcggcgccgagatcaaccgccggaacggccttcagtgagccgttgtaggcgccaatggcggtgcgcaccggctggcacagcacgacatctcttgcatgcatcgcattctccctaccaaacaatcagtttcaatcggccgcacgcactccatgcggtatgcgcccggtagccgggtcttgaaggttgcaacaagaattggctgcgcgggaaatccggctcaggcttccgccgagcgcgacagccgctggcgcacgcggtcactggcggcggggccgggtgcaaggtgatagtcggcatcggtgaccgggcgcccgttggcggggtcgaccagcacaggctccacgcgcacgccggtgcgccggttcgtcaactgcacgctttcaccttcaggcgcgagatgcttgttgccccaggccagcatcgccagcagcacctggcggaaatcgcgcccgcgctcggtcaggatgtactcggagcggggcgggcggtcgcagtactggcgacgctcaagcatgccttcttcgacaagcgagttcaggcgacgcgtgagcatattgggcgcgatagccaggttttgctggaactcgtcgaaccgggtcacgccgtaaaaggcttcgcgcaggatcaatacgctccagctgtcggcgacgcgggccgcggtgcgagcgatcggacacggcgtttcgccaagtggcttcttctgcatgattggcttcctcgagagacctgcttgctatcgatttgaaagtcagtctagggtagtcactatcatcgtgcaagttcgtttttcgcttgtgctgtattccgcgcccgcgaggcaccggaagcacgcccctgcccacaccgtctatgtggagggcaccgccgcccagacgccgattctgcacactgcccggcctcaaccgtttacttcgcacacgaactatctatatacttcgcatgcgaacttaatcgcgatgcctgcacggcagcgtgcaactctcacctggagaccgaccaatgacccccgaaatccgcattgacctcaccggcggcgtgctgaccatgacgcttgcgcggccggacaagatgaacgccttgacgaacgagatgtacggcgcacttgccgacaccatcgagcaggcacagcaggaccgggctatccgggtattgctgctgcagggggacggggacagctttacggccggcaatgatctcggcgaattcgcggcgatcgcgtcgggaaatggccccagcgaacgtcacgtgcatcgcttcctgcgcgcccttgccaattcgaccgtaccgattgtcgccgcggtcaatggcaaggccgtcggcgtcgggaccaccatgctgctgcattgtgattacgtggtgctcggccaggacgcgcaactgatcacgcctttcgtcaatctcgccttggttcccgaagcggcttcgagttacctgctgccgctgcggatcgggcacgtcagggctttcgagatgttcgcgctgggcgagccgcttgacgcgcaaacggccttggcatggggcatcgcgaacaaggtttgcgccaatgaccagctgcgcacggatgcgcgccggatggccgagaagattgccgccaggccggccggctccctgagcgcaatgaaacagctcatgcgcaatgcggaaaaactggtttcgcagatgaacagcgaaagcgccaggttcgaggagcggctggccagtgcggaagcccgggaagcattctcggccttcgccgaaaagcgcaaaccagacttcaccagggttgccgcgcagtgagtcgactgcctcgctctccggccgctgcgaggctacacctcgccctcgtccgcggccggaaactttgtctggaggctggtcagccagcgcgccaccacgtcgatctcggcggcggtgaaaccttcggtgagcctggtattcaatgccttcatgctcgccttggaacgctggcgcgccaggcgccctgcctccgtcagccacaggcgcgaggcacggccatcgttctcgtccggccggcgctcgatcaggccggccctttcggtccggtcggccaggccgctcatcccgggcgcgcccaggtccagcgccgcggcagcctcgctcgtcagcgcgccatcgttgctgcccaggaagaaaagcagtccggcctgggctgatgtcacgccacccgcggcagtgcgcgcttgtgaccaccgctgcaggcgccgctgacccacgttcaacaggtagacgaggcgatgttccatgtctggtgcgtcataaagggtgagatttcgttcgcatgcgaatattatcatgcgccggtgtcccgaatagcgtgacgcacagcgcctggccgtccgtcacacggcggccggctcttcgctgcgccgcgcacgggcggcacgcttgagggattgcggcggctcgccgaaaatccgcaagaacgcccggcgcatgcgctccgggtcggagaagccggtcttgctggcgatgcgctcgatcgtcagcgtgccggcttccacgagcaggcgggccgtgtcggcgcgcaagcgctcgacggcacgtgccggggactggcccgtgctctgccggaactcgcggctgaaatgccgcgggctcatgttggcggcgctggcgagcagctccaccgacagatcctggtgcagatgattcctggcgtaggtcaatgccgcttgtatgcgctctgacctcgattccagttccgacaacatcgagaactgggactgccccccggcacggcggtgatgaaccacgagcttcttcgcgactgcgcgcgacacgtcggtccccaggtcttgctctaccagtgccagcgcaaggtcgatgcatgccgtcatgccggccgatgtccacaccgttccgtcccggacaaagatgcggtcgtcttcgacgcgcaccgcaggaaagcgctgccgcagcgtactggcatggtgccaatgcgtagtagcccgccggccgtccaggatgccggcctcggcgaggatgaacgcccccgtgcagatgctggccatgcgcctggtcggctcgagtgcatggcctagcaggcgcagcagcctgggcgatggcgccggcaccgaggtagcgcccccaaccatcagcgtgtcaaaagccagcggatccatcgcggtggtctggatcgccgtgcccattgaactcttcacggccccgccgcgttccgagacgacatggatttcgtaggccgggacccgcacttcgaggttagccatctcgaagaccgacaccgccgccaaatcgagcatctgaaagccggggaagagcacgaggccgatttggttcatgttgtcctgaaacgagggaagttcgtcattcaggacaaaggctaggaccctatcctaaaactgtcaatcaactcccgatgggcttctcccaatgcgcgctatcgaccatccacgaggtatcgaatgaacatcattgcgctggcctgcaccactgtcctcggtctgcttctgttctcgctcggactcgccacctcggtgcagcggtccaggatcggcgtgctgagcggctacccatccgagcccgatcaactgctggcacggctgattcgcgctcacggcaacaccaccgagtacgcgccgttccttgcggtgctcttcctgtacctcggaactcagcatccgcctggctgggcggtctggtgcatggcaggtgcaactgcctgtcgcgtgctcctggtggttgcactgcttgcctggccctccatgtccaggccgaatccggcccgcgccgttggtgccctgggaacgtatgccttcgggacagccctttgcgtggccgccctcaccgtctgacccgggctgccgatgccggcagagcggccactctccaatcccattagtacctgacccttaaggggaatcgcatgaagacattgaatacgttcatcaggactgcggcgcttgttgccaccgtcagcagccttgcagccgctgcgagcacagccgccgccgcaccggctgctgacacccgcgctaccacggtggtgtttgtgcacggcgcctttgccgacggatcggcctgggacaaggtcattgccctgctccagtccaaggggcttcatgttgtatcggtccagaacccgctgtcttccctggccgacgacgtggcagccacgcgccgcgcgctcgacaagcaggccggaccggtcgtgctggtggggcattcctggggcggtgtggtgatctctgaaatcggacagcatgagcgcgtcaaggccctggtctatgtcgcggcgtttgcaccttcggaaaaccagtcggtggcggacctggccaaggattacccaaagcccgagggatccagcttcatcgtcgctgacaaggacggtttcctgacgctgacgcccgaggggatgtccaaacacttcgcccaggacgtgccggcggcccagacccggatcatggcggcgacacagggacccgtcagcggcaagagcttcgaggacaaggtcacggttgccgcatggcggaccaggccgtcctggtacatcctcagcgagcaggatcacatgatccagcccgccttgcagaaagcgatggcacagaagatctccgcccgcatcgtgacactgccgacgagccacgtaccgcagctgtcaaggccgaagcaggttgcggatgccatctacgccgccgcggtgtatcaaccgaaacccgacgtgcacccgccaacgacacgccgctgaccggattccactttccctctacctggtatcgacatgaaactccacgcaacacgcacggcacctgccatcgccacgatcgctttatgcctggctcaattggccttgccaagccacgcccaggcatcgccggccgccgaaggcggcgcaatcccgcaacgcgcggcgaccgaggacgcatccattcgccccttccacgccagcttcccgcaagcggcactggccgacctgcgccagcgcatcgccgccacgcgctggccagaccgcgagacggtatccgatcaatcgcagggcgtgcagctggcgaagatccaggagctggtgcgctattggggcaacgactacgactggttcaaggcagagcaaaagctgaacgcctacccccagttcgtcaccaggatcgacgggctcgacatccacttcctgcatgtgcgatcgcgccatcccaatgcgctgccgctcgtcatcacccacggctggccgggctcggtctttgaactgctgaaggtgattggcccgctcaccgatcccaccgcctacggcggccgtgccgaggacgccttcgatgtggtgattccgtcgatgcccggctacggcttctccggcaaacccgtcgggaccggctggggtcccgaccgcattgcaggtgcgtgggatgtgttgatgaagcggctgggctacacacgttatgtgtcacagggcggcgactggggctcggtcgtggcgcatgcgcagggccgccaggcaccacagggcttgctcggcattcacgtcaatatgcccgccaccgtgccagcggacgtcgcccgggcgctgaagaacggcgaagcagcgccggccggcctgtccgccgccgaaaggtcagccttcgagtcgatgaacaagttgtatacgctgggcggcggctatgccgcgatgatggtgacccgcccgcagaccgtgggctatggcctggcggattcccccgcagggcaggcggcatggatctatgacaagtttgccgcctggaccttcagcggtggcaaccccgagcgctcgctgaccagggacgagatgctcgacgacatcacgctctactggctcaccaacagcgccacgtcgtcagcacagctatattgggaaaacaacaccaacaacttcaacgccgccgagcagatgaccgcacagatcaaggtgcctgtaggcgtgacggtatttcccggcgagctctatcaagccccgcgcagctgggccgagcgcgcctacccccggctgacctacttcaacaaggtcgacaagggggggcacttcgcggcatgggaagagccgcagctgttcgctcaagagttgcgcgcagcgttcaggtcgttgcgctgagcgcggcaggcgggcggcggcgggcgctgaagcatggcaatgccttcagcgcccgagccgcccttgcttcgtgcccgcttatccgggcgcatggtccggggcatgcccgaccatgcgcaccgatggccagcgccgcccagctccgatgccagcgctgacagcgtcatggcagccagtatcagcaatctgcgcattgcgcccctcatgcgtcagcgcctgtctacatcgagcaccgcctgcgcaaacgccgtgggcgcttcctgcggcgggttgtggccgatcccgcctgtcagttcccggtgctcgtagcggcccgtgaacttgctggcataggcgctgggctcggggtgcggcgcgccgttggcatcgccctcgatggtgatggtgggcacgccgatggcgggtgccgtggcgagccgcttctcgaggtcgtcgaacctggcttccccgctggccaacccctgccgccagcggtagttgtgaatggtgatttcgacgtggtcgggattgtcgaaggcggcggcgctgcggttgaacgtcgcatcatcgaacttccattgcggcgatgccagtttccagatcagcctggcgaactggtgggtgtacttctggtagccggcgcggccccggtcggtggagaaatagaactggtaccaccactggagctcggcctcgggtggtagcggctgcttgccggctgcctggctgccgatcaggtagccgctgaccgcgaccagccccctgcagcggtccggccagatcgccgccatgatgtcggcggtgcgcgcgccccagtcaaagccggccactacggcattgcggatattcagcgcgtccatcagcgcgatcatgtcggcggctatcgctacgggctggccgttgcgcatggtgtcggcagacaggaaggacgtcgagccaaaaccacgcaggtggggaatgatcacgcgatagccgcgggccgccagcagcggcgccacgtcgacaaagctgtggatgtcgtagggccagccgtgcagcagcagcgcgaccggccctgtggcagggccggcctcggcgtagccgatattgagcacgccggcgttgacttgcttgaccggcgcgaagctggcatgggtgcccggcgtggtcaagggcagcgccggcgccttcgacagaccggtttgcgcgcgggcggcctgcggcagcccgaacggcgcggtggccagcgtcactgccgctgcacccagaaagcctcgacgaggtagatcgactgtcttcgacatttgcttctcccgtttgcgtgatcaatgtgagcacgagtctaggaggccatggcaagcggaatgtgtcggatttcaggggatttgtatcgctgtgtatgtatccgcgatggcgacatacttggatacaaagcagcccggctgaaggactggcacgccagtcaagcggactctccctgcggcacgccttgcggcattggcctgttgccctgatctggaagattgcaataggcattagctgcacgagcgcacgccacaccgttttcgcgcgggcgctcccccgcatatgccaccgtggcgctcgccacgatcagcgcgacaggcaggagccgattgcacagactgactttcatggtcgttccacaatcaatgcgcgtctgccgacggacccttcggcgctgcaaccttgcgcatcagcggcaccatggcggtggcgatcgcgaagcagaccaggatcagcaggaagatgtcgccaaaggtctgggtctgcgcctcgcgccaggccagtccccacaattgcctgagggcggcggtctgcgcatcgagggcatcgtgcccgaccgcgacgaactggtcgctgatcccttgcaacaggttgcccatggcttcattacggatgttcaggtgctctgcctcgcgcaggaagtgcaggttgccgcggttgttgagcgcggtcgcgcaggcggcgatgccgatggccccgcccaggttgcgcatcaggttgaacagcccggacgcaagcttgagccgctccggcggcaggctgcccagggtcagtgtcaccgtgggcgccaccgcgaactgctgggccatgccgcgcagcgcctgcggcagcagcagttgcgccgcgccccagtcgtgcgtgatgggcgcgaagtaccacatcgacaccgcgaacagccccaggccgatcatcatcaaccagcgcaggtcgacccggttggccaggaaggcatagagcgggatcgatgccatctggaacacgcccgtggaaaataccgccagcccgatatcgagcgcgctgaagccgcgcacgcgccccaggaacagcggcgtcaggtagatggtggcaaagatgccgatgccggtgacaaaggagaagaagcagccgagcgcgaagttccggtccttgagcgcgcgcaggtccaccacggggttggcataggtcagcgtgcgccagatgaagcccacgcccgacaggccggagatccaggcggtggccaggatcacgtcgtcgccgaaccagtcccagcgcggcccttcctccagcgtgtattcgaggcaacccaggaacagcgccatcagcaccatgcccaggtaatcggcaccgcgcaccagcgaccagtcgggccggtcgatcttgaccagcagcggcacggcgatggtgacgaagatacccggcaccaggttgatgaagaacagccagtgccaggaatagtgatcggtgatccagccgccgatggtgggccccagcgtcggcgccagcgaggccagcccgccgaccgtggcggcggcgatgacacgctgggggccgacgaagaaggcaaaggccgtggtgaacaccatcgggatcatcgagccgcccaggaaaccttgcagcgcccggaacacgatcatgctgttgatgtcccacgccaccccgcacagcaggctggccaccgtgaagcccgccgcggaggcggcgaacagccagcgcgtcgacatcacgcgcgacagccagccggacaagggaatgacgatgatctcggcgatcaggtagctggtctgcacccacacggtttcatcggcgccggccgagagcgcgccgccgatatcgcgcaacgaggcggagacgatctggatatcgagcaaggcgatgaacatgcccacgcacatcgtgctgaaggcgaacaccttggcggcagtggacatctcgtccggcatcgccacggcggacgcaggggtggtcagggtagccgtggtcatcactgcacctgcttgcctggctgcgtgttgacctgggcgatcaccgacaggcccgggcgcaggaccccaagccgggcatcctgctcgtccaggcggatccgcaccggcacgcgctggacgatcttggtgaagttgccggtggcattctccggcggcaacacgctgaactgcgcaccggtggccggcgccaggctggcgacgtggccatggaagacccgccccggcagcacatcggcttcaatttcgaccggcatgccggggcgcatgtgcgccagttgcccttccttgaagttggcgtccacccacagcccgctggccggcacgatggacagcaactggctgccggcaccggcaaaggcgccgacgcgggcgcgccggttgcccacggtgccgtccacgggcgcgcgcagttccgtatagccaaggttcagcttcgcgatgtcgcgctcggcggtcgcctgcgccagcgacgcctgcgcctgctgcttctgcgtgccgatcacgtccagctggcgctgcgcggccagcagcgccgcacgcgccttctcgccattggcctgggcctgcttgtagtccgagtcagccttctgcgagctctggatggagacagccgccttcgccaccaggctggcgtagcgcacctggtcgtcgcgcgcccgtacggtgtcggcattggtggccgcgatgccggccttggcctgggcgatgaccgcctcctgcaggcgcgcggtggcatccaggtttgccagcagtgcctgttgcgccgccacggcgccttcggccttggccagtgcggcgcggtagtcgcggtcgtcgatacgcaccagcacatcgcccgcgtggaccgtctggttgtccgtcaccgcgacttccgcgatgtagcccccgaccttggcgccgatcaccgtgacatcgccgccgacgtaggcgtcgtcggtacgctgcaggtggcgagccgatgtccaccagtggtagccgtatccgattgcggccaatccggccacaaccagcgcgccggtcgccagcagccgcctggggctggccttggatttcgaagcgggaacgggttcggtacccgcccgttcagtcagcgtattactgctcatggcacttcctttctgctttcaggacttatcccgcctgcgaggcggcatgggtggagggttcggtagggttcgggatagttcgggtcaggcttcggccgagcggtccagccggcgccgcaggccgtcggtagccgccggcccggggacgatgtggaaatcggggtcggtgacggggcggccgctggcggcatcgaccagtaccggctcgacacgctcgccagtgagtcggttgacgagctgcacgctttggccctcgggcgcgagatgcttgttggcccaggccagcatggccagcaggaccgggcggaagtcatggccgcgctcggtcaggatgtactcggaacggggcgggcggtcgcagtacgggcggcgctccagcaagccgtcctcgaccagcgagttcaggcggcgggtcagcatgttgggggcgatgcccaggttctgctggaactcatcaaagcgcgtcacggcatagaaggcttcgcgcaggatcaggacgctccagctgtcggcaacgcaggccagcgtgcgagcgatggggcaaggcgtctcagcaagcggctttctctgcatgagtggcttcctccgaaattgtggttgctatcaaattgaaagttagtctagagtagtaactatcatcatgcaagttagtttttggcttgtgctttattcgtcgctgttgaaaggtgtccgtcatgccccaaagtccattccgccccccgctccggcgcacccgcgccggtatcgcccgcctcctgcccaccctgcttgcggccagcgccgcggccgccctggtggcctgcgcggccggccccgattaccacatgccggcctcggacatgcccgcggcctacccgcacgcagcggcgctggacgcccgcgaggccacgcagcccgcgccgtcactggacagctggtggctgggctttgacgatcccacgctgacgcgcgtgatccagcgcgcgctggagcagaacctcgacctggcggcggcgattgcgcgggtcgaccaggcccgcgccgcggccagccacgccggcgccgaactgctgccgcaggcatcgttgtccggcagcgtggccaggcagcgccagtcgctggaagggcctttgggcagcctcggcaagaacgcgccgggctttgagcgcaacaagacggtgtacagcgctggtgtgggagcaagctgggagatcgacgtggccggcggcctgcggcgcggcgccgaggccgccagcgcggaggcccaggccgcggaagccgagcacatgggcgtgcgcgtgctggtagccgccgaagcggccgatgcctacttccgcgtgcgcggcgcgcagcagcgcatcgccatcgcgcaacagcaggtgcggaccaatgcaaagctgctcgagctggtgcagctgcggctggccgatggcatcggcgccgagcgggaacgcgcgcaggcggaagcacagctggcacagacccgcgtgaccatcccgccgctgcagatcgaactggagacacagctgaaccggctcgatgtattgatgggcgcgcatccgggcacctatgccgctgaactcctgacgccgaccgagcgcaccgccgtgccgcagatcgccgtggcgcaaggtccggccaacctgctgcaacgccgcccggacgtgattgccgcggagcgccggctggcggcatccagtgcccgcatcggcgtggccactgccgagtactacccgaagctgtcgctgtcagcgctgctcggcttcgagagcctctccgccggcaagctgttcaccgggtccgccttccagcccgccgcgatcgcgggactgcgctggcggctgttcgacttcggccgggtcgatgccgaagtggcgcaggccaaaggcgccaacgccgaagccctggccacctaccgcaaggccatgctgcgcgccaccgaggacgtggaaaacgcgatcatcacgctgacccagctggagttgcagggcaaggagctgaccgtggaagtggctgcccacgcgcgctcgcgcggcgccgccgaggacgcctacaagggcggcgcggtcagcctgttcgaagtgctggaggaagaccgcctgctgctggccgcgcgcgaccagcaggcacgtgtgggcgccgacaatgcccgcgcggcggtggcaacgttccgtgcgctggggggtggctggtaacgtagcgggcggcggctcaacccaccctgagccgcgcctccaggccaccgccctcgcgattgcgcagcgtcagtgagccgccgatggccagcgcaagctggtgcgcaatcgccaggcccaggccggtgccgccggtctcccggttgcgcgatgcctcaagccggacaaacggctgcagcacggactccagctgctcagccgggatgccgggcccgcggtcgagcacgctgatggtcaccgcgccgccgtcctcgcggtgcacgctcagctccgccgccccgccgaacttgagggcgttgtcggtcaggttggtcaggatgcggcgcaaggcgtgcgggcgcgtgtcgagggtgccgccggcacgctgcaggatggtgacggccttgccggtgtcctggtagtcgtagaccaggctctcgacgaacgagccgatgtcgatccgcgacggcgtctcgccatcgccatgcatggcgcgcgcgtaggccagcccctccttcaccagcgtttcgatctcggtgaggtcttgcaccagcttgcgcttttcctcagagtcttccgtcatttctgcgcgcagcttcatccgcgtgatcggcgtctgcaggtcgtgggaaatcgcggccagaatctgcacgcgctcctcgacaaagcgggcaatgcgttcgcgcatggcattgaatgcgcgcgcggcgcgcaccagttcggtgggcccggtctcgcccagcggctgggtcctggcattcgggtcgagcgcgtcggcggcattggccagcgccaccagcgggcggatcgccaggcgcacgccaagccagcagcacaggatcagcagcagcaactggataagcagcacataaggcagccattgcgcgaccggcgtcggcttcggatgcacgtcgatggtcagcgggctgccatcgctgagggtcaggtgggcctgcatgcgcttgccctggccggggatggactcgaccctgaccgggaagcggccgccgctcgcttccatgatccggtcggcaacttccgtggcctgcgcggacatctctggcacgcccggcagccccggccccaggatgtattggtaggcgccgcgattcacgtggcgcagccactgcgggcgctccgccgcgggcaggcggtcgaggatggcgatcgaggtggagacgtcggtctccagggtgccgagcatgaccttgcgcgcggtaatgtagcgctcggcaaacagtacgccgaacgacaggccatgggcgacgatgaggccggccagcaggatcaggaacagccgcgcgcccatcgtacggggccagggcaaggcacggagattcactggcgtgcctcccggatctccacgggcgtcgagaagacatagccctcgctgcgcacggtcttgatgtagcggggctcgcgcgcgtcgtccctgaggtgctggcgcaagcggctgaccagcaggtcgatcgagcgctcgaacatttccgcttcgcggccctgcgtgaggctgagcagctggtcgcggttgagcacgcgctgcggatggtcgacaaagacgcgcagcagccggtattccgcgccgctcagcgcgacgatgacgccatcctggtcaatcaggtggcgcgcggtggtgtcgagctgccagtcgccaaatgcaagcagctgccccgcctcggtgatctgcaggttgggcggaagcatccgggtccgccgcagcaccgccttgatgcgggccagcagctcgcgtgcggcgaaaggcttggcaagatagtcgtcggcgcccatttccaggccgatgatgcggtcggtctcgtcgctgcgcgcggtcagcatcagcaccggggtggccttgtgcttgcccgcccgcagttcacggcacagcaccaggccatcgtcgcccggcatcatcacatccagcacgatcaggtcgacgctgttcacgtccaggaacgaccgcatgtgccgcccgtcaggcaccacggtaacgcgcaagccgttcttggtgaggtaggttgagaccagttcacggatttcgcggtcgtcatccacgatcaggatgtggtcggtgtgtgcttccatcggcgtcaccttggcagattgattgaaaaccgccaggcgcggcgccgggcaccgaaagattaacgcaatacggcgcgacgggtattcccccatcgcgccgtcgggtaacacccgcggtgcgccggcgcgcgccgcgggggtgtccgctcaatgccctgcgctctggccgccgtctacatgcaggatctcgcccgtgacgaacggcgcgttgtcgagatacaggaccgcatcgacgatatcgcgcatctcgcccatatgccccaccgggtgcagggcgcccagcgcctcatgggtttccggcgcatgcatcggcgacttgatgatgccgggcgcgaccgcgttggcgcggatgccggtcctggcgtactcgatggcaagcgacttggtcgcggcgttcaggccacccttggtcagcgaggccagcaccgacggcaccccgctgatcgcatggtcgaccaggctggtcgtgatgctgaccacgtggccgctgcgctgcttctccatttcggcgatggccagctgcgtgatatggaagaagcccgtcaggttgatgccggtgacggccgcgtagtcctcgtcggtatagctggtgaacggcttggcgacgaagatgccggcgttgttgaccagggtgtcgatgcggccgaaccttgccacggcctcggcgacgacgcggcgcgccgtggacggatcggcgatatcgccggcgactgccaggatgtcctggtcgtccgacggcttgatggtgcgcgccgtggcgacaacgcgatggccgcgctcccggaacgccttgaccagttcggcgccaatgccttgcgatgcgcccgtgacgactacgactttctgtgctgcactcattttcttgaacctcgatgtagattgaatcggcttgtttgccgatcgggccggcggctccgatgggttccaatctaggcaattcgcttccgtattcgaagaccctggcggcacaaacagtcttgcgccacaagcacaaatggagcgggacgaatcctccggcgcgcctggcgtgcgcagcctcatggtcacttcggcgcaggccacggcccggacatcgacttctgccagtggcgcacatatgatggatacatcgcttgatccggtgcggcctgcggtcgcaagcaaagaaatgaaacggcaattcgatgaccttcagcttggcagcatcgagctgttctgcctggccgcggagctgggcagtttcaccgcggcggcagtggccgcgggcgtgacaccgcccgcagtcagccgcactgtgcaaaggctggaagagcgcctgggggtgcggctgttcgtgcggaccacgcggcagatccgcctgaccgacgaaggccgggtgtatttcgagcagagccgcggcgcactggcgcagctggtggacgcggagcggcagatcagcggccagcaggctgcccccgcggggcgcttgcggatcagcctgccgaccccttacgcgcactatcgcgtgctgccggtgctgccggcattccgcgagcgctaccccgaggtcgagatcgacgtgcacatcagcaaccgcaacgtggatttcgccgatgacacctatgacctgtcggtgcgcgggcgtgcgccggatgactcgaacctgatcgcgcgcaagctggaagacgcggagctggtggtggtggcaacgcctggctatctgcggcgtgccggcacaccgcagtcattggaggacctgctcaggcatgagtgcatccagttcgagcgcccgagcagcggccggcggatcccatggacgttccgggtcaacggcgaggacacggatatcgtgaccgccggctcgtatgcggcgtcagaagacatcctgggcggggccacgctggtgcgcgccggcgcgggcctgttccagacctaccgcttcgtcgtggaacaggacctgcgcgacggcacgctggtggaggtgctgaaggactacggcggcagtacgcgcccctttgtgctgctgtacccgtccgcgcgccacgtctcgcgccgggtacgggcgttcgtcgacttcctggtcgagaagttctcggcgtagcggctcacgccgcgcttattcaggccggatctgggcaatgaccacgaggatcacggccgcattcgccggctgctggaagtgcgaggaaatggtgcgcgcgtggccggccttctctgccagcacctcgccaaacaggtccgaggcaccgtcgagcaccgccggctgcccgaaccagccgggcgcgctggaaatgtgcccgtcgacgcggacgatgtggtctaggcgctcgaagccacccaggtaggcatggatctgcgccagcacgttgagcgccgccagctcggcggcacgcttgccctgcccgacatccaggtccttgccaacctggccttgccagaccaccttgccatcctgcaagggcaactgcccggaaatgaacaggaggtcgccggcctggctgaccgcggtatagctgcccaggggctgcggtggctgcggcagcaccaggccgcgcgctgcgagacgttcttgcacagacatgctggctccaatcaggtgagggtcacgcgaccaactctatgtgcgcgccagcctgggataaaggcatggcgcggaacaggaattggtacctggggtaacaagtcggatacccgacttccttgcatgcccctgtaccggcacggccgcccctacgcggtctgcagttcgtcgccgcgcgccatgcgccggatcgcctgcggcggttggccgaacgcccgcaggaacgcacgccgcatgcgctcgcggtcgccgaagccggtatcccgcgccaccacatcgatggcatggcggccgccttccatcatcagcctggccgcctccacgcgcaggtgctccacggccttggcgggggtctgcccggtctcgtcacgaaatgcgcgcgcgaactgccgcgggctcaggtgcgccgcatccgccagttgttccaccgaaagttcctgttgcaggttctgccgcgcgaaatccagcgcggcacgaatgcggtccgagcgcggttccaggtccagcagtgccgagaactgtgactggccgccggcgcgccggtgatacacgaccagcaacttcgccacatcgcgcgcaaccgcggcgcccgcgtccttctccaccagcgccagcgccaggtcgatgcaggccgacatcccggccgaggtccagaccgggccatcgatgatgaagatgcggtcctcttccacgccgacgttcggaaagcgccgccgcaactgctccgcgtagtaccagtgcgtggtggcgcggcggccgtccagcaccccggcctcggccaggttgaaggcaccggtgcaggtggcgccgatgcgccgcgaagtacgcgccgcacgctgcaggaacttcaccagggcgggcggcgtgggcagcacgtcgttgtctcccaccaccagcacggtgtcgaagcgacgcttgccgaacggctcggtgccgacggaaaagccaccggaactcaacacggggccgccatgctcggacagcaggtggaccttgtacagcggctctccgagcgagcggttggcgaactccagcaccgtcgagaccgcgaggttcagcgcctggaagccgggatagagggcaagggccacgtgatgcatgtcgatctcccgagggcagcaggaaggtgtccttcccggatggcagaaaaggtggcatctatgacattggtgccaacgccattgtgcgcctaatcttggcttcacgcagccggccgatccagcgccgaccgccaccaacatcccccctcactgaatctggagctttgacatgaccacgcacaaccattccggcaccgccctcatcaccggtgcttcttccggcatcggcgccatctatgcggagcgcctggcgcgcaggggccacgacctgatcctggtggcgcgtaaccgcgcgcggctggaagcactggcccgccggattaccgacgataccggccgctcggtcgaaatcgtgaccgcggaccttggccaggcagccgatgtacgacgcatcgaagagatcctgcgcacggatgcaagcatcaccacgctggtcaacaacgccggcttcggcggcgcggcaccgctgctgcaatcggatgtcgacaccatgcaggcaatgatcgagctcaacgtcacggcgctgacccggctcacctacgccgccgccccggcgttcgttgcgcgcggcgagggcaccatcatcaatatcgcctcgatcgtggcggtcgcgcccgaggtcctgaacggtgtctacggcgccaccaaggcgtttgtgctggcctttacccagtcgctgcaacatgagcttgcgggcaagggcgtgcgcatccaggcggtcctgccgggggccacccgcaccgagttctgggacaccgccggccagccggtcgagaacctgccgcaatcgatagtcatgagcggcgacgacctggtcgacgcggccctggcagggctggaccagggcgaggtgattaccgtgccgtcgttgcccgacgtggccgactggaacacgttcgaggcggcacgcgccgcgctcggccccaatctttcgcgtgaccagcccgctacccggtacggcgttgcccggtaactgacggctcgcggacgcgcgcggcctttacaccaccttccccggggcgcgcggtatccggcaagcgctccggccgccgcgcgcctcctccctgccgcctacgccagcaggcgcctcccatggtccttttgtatcgctatgtatcaagcacaggggacgatacgtgccctgacagaaacagggtctccacgctatagcgcagatacaccggtttcctttaatgcatctcgtggaccgacggcatgcgtcgacaagacgatcccccggccgcgcagttcaacccagacctcaaggaaaccgaccaagattaccgatctcaccaagcgcattgttctcgccctcgccctggcagctgccgccgccggcgcccaggccgccggtcccggtgcgcgcgatccgttcagcgaaggcgcacgttccgtgcaggacgcacgcaacgcattcaccgacggcgcccgcgccgtgcaggacgcacgcgacccgtacaccgagggcgcgcgcaatgtcgacccgtacgacaagggtgcacgcatcctggccggctgggaccgcacgggtccgtccgctgatccggcgcgcagcttcgatccctaccaggacggcgcccacgcctgatagcagggcattgaccctcggctattccgctgcgcgcggcgcagccgtggaaccccgcacgatcagctgcggcgtcagttgcacggtgacggcatcggaggctggcttgtcgatcttcctgagcaggagacgggctgcctcctcgcccatttcgtggacggcaatgcgcacggtggtcagcggcggcgtcagggcgtcggcgaaaggcatgtcgttgtggcccaccaccgagacatcctcggggcaacgcatgccgtgctcgcgcaggtagtcgtagcagcccatcgccaccaggtcattgccggcggcgatagcggtcacctgcggaaatgccgcgaagagctgctcgcatgcgagccggccggcctcgcgcgaatagctggcggcctccatgacttgccattccccgcggcgcaggcggtggcgcttgaccgcctgaagaaagccctcgcgacgcaggaagccggtcgacagcgtggctggcccggcaatatgcccgatgcggcggtggcccaggccgaccaggtggtcgaccgtctgccgcatggccagcaggttgtcgctcaccacgcaggacacccggcccgtgtcatcgccccggttgaccgtgaccacggggatatgctgcttaaggcagtaggcgaggatcggatcgtcccgttccgcggtggcaagcaccagtccttcgacttgccggccgatcatctggtcgatgacaaagcgctgccggctcttgtcggtaccggcattgaccacgatcggcacgtagccctgctgcgccagcacggattcgatcccggccaggatgggcggaaacaccgggttggaaatatcgggcagcaccacgcccaccagtccggaacgctgggtgcgcagccccgccgcgatgcggttggggcgaaagccgcgcgcctcggcaacctccaggatgcgggccgccacgtcctcagccaccaggtgccgcgtggccgggttcatcactcgcgagatggtcgagtaatgcacgtcgatctcggcagccaggtctttcagggtgaggcgcttgcgctcaggcatgacggcagttggcggggcggcagcccggggagggttggaaaccaccattctaagccagccccgcgccgtcgccgcacgcctgccgggtgccgctactgccccgctttcacgccggattgcctgaccaccggcgccagcttgccgatctccgcctggatataggcagcgaactcctgcggcgacgagcgctttggctccgcgccctgggcggccaggcgctcgcgcacatccggcgcggccaaggccttgccgatctcggcattgagcgcatcgacgatttccttcggggtgccggcgggcgccagcacgccgaaccaggagtcgaacgcgtagccggggaagccggactccgccaccgtgggaatctccggcagcgcgctggcgcgcctggccgtggtgaccgccagcgcccgcagcttgccctgcctgacgaacggcatggccgatacgctgggcgcaaacatcatgtcgccccggccagccatgacgtcggtcagcgcttcgcccgtgcccttgtacgggatatggacgatgtcaatgccggcctgcatcttgaacatctcgccgctcaggtgggtggagctgcccgaacccgccgagtcgaaattcagcccgcccggcgtcgccttggcggcgttgacgacgtcccgcaccaacttgtacttgctggcggcattgaccaccagcacattggggaccgtggccaccagcgagaccggcgcgaagtccttcaccgtgtcatacgagagcttgggatacagcgtggcgttgatggcgtgcccgaccgaaaccaggatcagcgtgtagccatccggcgccgccttggccacgccggtggcacccagggtgccgccggcgccggggcggttgtccacgatcacctggtaagtgccgccctcgcccatcttgctgccgatgatgcgcgccaggatgtcggtggcgctgccggccgagaacggcaccaccagccggatcggcttgctgggatattgcggttgcgcgtgggcggcgggtgcggccgccagcatgagcgatgacgccagcgccagcacggtgccttggatggatcgaatcattctgtgtctcctcactccagaagcgagcgcgaacaccgcgcgtcgccgatgaatgcggcatgcccatgccgggcgtgccgccctgcttcagaagaagtgccgcatgccgagcgcgaccgtctgcgggtctgaacccgcgctcacgcccagttcattgatggcaaagtcgtagatcgcattgcgcttgttgttgatgcggctgtagtacgcatacagcgcggtgcgcttggacagcggatagtcatagccgaccgtgacctgcgtggcacccgtttccgcgccactgcggaagaagcccacggtctcggtcgcattgcccgcgccattgctggcaaggccaaaaccgacgcgcacgctgcccggcccgagcttctgcaccagcgacgcgtagtacccgttgcgggtcaggtcgccggtcgcggtgcggtagtggagccgttcatagagcagcgccacggtggtggtggggaacttgtacgagacgcccgccttcatcgcatcatcgttgcggccggcggtctggtagtgctggtggacttcataggccagcaccacgttgagcgggccgttgtcgtaggccgccgagaacgaatacaacccgggattgcgcggtacggtggtcttctcctcattcacgccccacgccgcggcgccgctgaagccggcgaacaacggcgacttgtagacgatgatgttcttctgccggcggtcgaacgagctggtgtcctggacgttgtcggagctggacgtggagccgttgccgatcagcgccatatagccggcggtggtcggatagtacgggtcgtaggccattgtcgattcggtgtatggggtctgccaatgccccaggaacagcgtgccggcatcgccctgcagccccacccgcgtattgcgcccggccacctggccttggccggtatcgagcgagaaattgctttcgatctgccagatggctttcaggctgccgcccaggccttcttcgccgcgcatgccgaagactgagcggttgttggtcaggcgccccacgccgccaaggcgggtgccgtcggtcgcggtgttggcataggaatactccagtgccgtattgatgcgcccgtacagcgtcacggccgactgcgcgctggcctcgccgccacaggctgcggccatggccagcatgagcagatggctgggctttctgatggacttcatttgtctcccctggtttgtcgtggttgttgtgggcgggccgtctgccccgctcttttgcaatcgtttgcagtccggcccaaaaacatcagctcttgggatacggcatcgccagcaacagcatcgccggccgattgcccgggttgaacacctgccgcgcctcacccggcgccacgcgcacggaatcgaactgggccagcgtcacgcgctcgtcgggcgtggcgatgcagacttcgccttccagcacgacgtagtgcttttccacgggcgcggcatccatcgacgtatggccgcccggcaacagcaccgagacccccatccacaaggcttcggacggtcccgcttcatgcccttgcaggcgcaggcagtgcatgccttcatgattggccggaaagtaggccggcgcctgcgcgaaccgggtcgtgttcacggcttcagcaccacgcgttcggtcgcgccttgcaggaccgcccggtaggcctccttggcgtcggagagcgaataggtgtagtcggagaagaccgggaacggccgcagcgcacccgaggcgaacatcggtgcgagctggtcaaggatgcccgcgcaggcgttgctgtccagcgcaagggtgtcgacgcccacataggtgtgctggccacgatagaaggcgaagatgtcaaacggcaccggcttctcaatggtcgagatgaagatctgcgccgcgccgatcgccatggcctggttggcctgttcgaagtaggggcttcccaccgtgttgtagacgatgtccgcaccgtgtccgtcggtctcttcgcgcaccaccgcggcaatggattcgctgctggcatcgatcatgcgcacgtcgccgctggcatggccgcgataggcttccgcggtgcgctccaccgcaaaaacacgcgcgccgagcgcggtggcgatctggatcgtagcctgccccaccttgccattgccgccacacaccagcacggtgctgccagcctgcggcatgcccgcgcggcgcagcccttcataggcggtaatgaacggcacccccacggcgccggcttccagcagcgacaccgacgccggtttggcgcgcacggcgctggcctggatgcgcagatacttgccatgcgtgccgtcgcggcggatgccgagctcgccgccgctgccccagaccggctggcccagcagctcggagggtccgtcgaccaccaggcctgcgtagtcgcggcctggcgtgcgcggccagaccgcatgcggcatcaggccgagcgttgccttcacgtcgctcggattgaccccggcactggccacttcgatgatgacctgaccctgcgccgcttccgggcgcggcacgccgagcagctccagctgcagggcgtcgatattggcggctttctcgctgactcgaatggtgttcatggtgcttccttcctgaaatgtttggttcggtatggccgggatcaggcctcgcgcaggccaagcgtgcgccgggcctcggccgacgacgcaatctcgccgccgagcgacctgacgatgtcgcgcgccttggcgaccagcgccgcgttgcttggcgccagcacgcccttctccagatagatgttgtcttccatgccgacacgcacgtgtccgcctgcaagccatgcctgggccacgatcgggaactccgcgcggccgatgccgaaggccgaccagtgggcgccggcgggcagcatgctgcgcgcgtagaaaatggtttccggcgtggccgcaaagccgtacttcacgcccagcaccagggtccacaggccggggccgtccagcacgccttcacggatgaagtcgagcgccatattgaggtcgccggaatcgaagatctccagctcgggcatgacaccggccgcgcggatcacgccggccatcttgcgcacgttggtgggcgtgttgatgaccacgtcgccgccggagttcatggtgttcaggtcgagcgagcagacgtccgggcgcagcgccgcgatgtgttcgacgcgcttggcgggatgcagcagcgtggtgcccggcgcggccacgcgcggctcgtcctcgctcggcacgaagcggccaccgggcccggtggtgaggttgatgatcagcgagcggttgcgtttgcggatgcggtcgatgacatcggcgtagtagtcgagcgacatcgacgggcgccccgtttcggggtcgcgcacgtggatgtgggcggcggctgcgccggcctcggcggcttccagcgcggcgtcggcaatctgggccggcgtgaccggcaagccggggtgctgctccggggtgacgatattaccggtcaccgcgcaggtgatgatggtcttgcgtgcgtgcatgagcgaaggtcagtgatggaaattcggttgggtaaacaagcggggcccggcctatccaagctggcggccgccgtccacgacgatggtggtgccggtggcaaagcgcagcgacgtcgcgcacgccgcgatggcatcggccacgtcctgtgcctggccgacgcgcttgagcggcgtcgacttggcggcgcgctcgttgaagccgctgtcgcgtcccggcacgaaggcggtatcgaccacgcccggtgatacgttcagcacgcggatatgcggcgccagcgcgcgcccgagcgacatcgccatgacatcgaggccggccttggcagcgcagtacgcaacgttgctgccctgccccgtacggccggcgatggacccgacattgaccaccagcccgtcgccattggcgcgcaggtgcggcgcgaacgcacggatcgcagcaaactgcccgcgccagttgatggtaaacagttcatcgatcagcgcatcgtccagggcgtccaggtcggcgtgcgggatcgcccgcgtaaagcctgcggtgttcaccaggatatcgacgcggccgtagtgatggctgacctcgtcggccagcgcgcgcagcgaggcgctgtcggcaacctcggccacagcggcaagatggttgccggccggcaaggccgccgcggcactggccgcctcgtcggcgtcgcgcccggtcagcacgacgcttgcgccaaggcgcgccagcgtttcaccggcggcaaagccgatcgcgccggtgccgccgaggatcacggccaccttgccggaaagaaaagtagcactcatggtttcaatgtgggaatgggtcaggggaagccgatccggcgatcagtcgatcggcggcttcgggaaggtctgctcgccgggctcgagcgtgaaatcgaacgccagtgtgtagaacggcgccggcacatcgccccacgggctggggccttgatggtgcagccggagatcgccaaccagctgccgatgcacgccgaacgtgacatcggattccagcttgtccggcgcgtcggcaaacacctgggtgacgagcgtccggtaacccggcgccgcgacgatgaaatggatatgcgccggccggtacggatggcgttgctgctcggccagtagcgtgcctaccgggccgtgggtcggcacgggatagccggcaggccgtaccgtgcgaaagtggtagccgccgctttcatcggtatggaagcagccgcgcaggttgcggtcgggctgggccggatcctggttgtcatacagtcccaccggcgacgcctgccagatctcgaccagcgcgcctggcagcggcgtgccatcggtcgcccgcacggtgccgctgaccagcagcggcaagccaggcgcgtcgtcctgcaccacgcagtcaccgcagtcatagcgcggcgcgttggcgcgatagaacgggcccagcagcgcgccgggcgtgcgcccgtccctggtgctgttattcatgacggtcaccagcgtcgacagccccagcacgtcggcagccagcacaacctcgttgtgtttggcattggtcgcatggcccaggctggcgatataccccagggcaagctcgaattcctcgtcggacagccgcacctcggacaggaacccgtgaaggtgccgcaccagggaatccatgatgaagcgcaggcggggattggcggtattggccatggccgcctggaccacgcctgtcaccgagtgttcgtcctcgatcagcgccagacgctcgccttgtggcgcctgccgctcgctggaagtttccatgttttgcctcctttgcaaacgtttgcattatcggcggtttcgacggatggtcaaggtcgaagttggtcaccgccacgactagcaacggctgccgttcaaccagaatcacaatcaaaacaagggcgtacggaggattttcgggagaaaccctaggtgcatgcagaggcgcagaatgtggcgcataagcctgtccgagtcccctgccgatgcggctccccagcccgttcgcgcatgaatttgtacccgtctgtatcacgcagctgcaacgatacgtgtttcgacagagacacccctcacgcgctacgggccagatacatcgatcgccttaaatgcattccgtggcccggcggcgatcctcaacaaagccagtccctgccgcgcaataccgaacccaaacctttaaggaagacgatcatgactacccacaacatcgccaagcgctttgtcttcgccatcgccctggttgccgccgctgccggtgcgcaggccgccgcactgtcccagccgggcgcgcgagaccctttcaccgacggtgcccgctccgtgcaagaggcacgcagcccgtacagcgacggcgcgcgtgccgtcgacccgttcacggacggtgcgcgcaacgtcgatccgtactacgacggcgcacgcaccctgtccggcctggaccgcaccggcgtttcagcggacccggcgcgcagtgtcgacccctatcttgacggcgcctacgcctgaaccccgactttctgaataaacaaggagcgcatcatgacccgtatcgaaaaagtgctgtacaccggcaaagtccacatcagcgcaggcggacgcgacggcgaagcccatagcgatgacggccggctgaaccttcaactgtcctcgccgggcaccaaaggcccgggcacgaacccggagcaattgctcgccacgggatggtcggcgtgctttatcggcgcgatcgggctggccgccggcaagatgaacgtgaagctgccggccgagctttcggtcgacgccgaggttgacctgggcatggctggcgaggcctatttgctgcaggcccggctcaatgtccacatccccggcatcgaccgtgaagtggcccaggcactggtggataccgcgcaccggacctgcccatactcgaaggccctgcacggcaacatccacgtcgagaccaacctggtctgacacacaccgtgacctgcctgaggccaaccgggcaggtcatcttccggaaggaggctcccatgccgaagattggcatttcggtacaggctgcggcactgaatatcccgccaggcacgttccatggcattaccctgatcggggccgtggtggctgccgttacgactttcctgacgctcaccgcagcgctacccgcctgggccatgttccttggctgggtcgcattcaacacaggctcgcagacggcgcgcgaaggcgcagcgaaccttgcggcattcctgctcggcatcgtcttcggtgctgcgaccggactgctgattggatggctgacgccgcgcttcggtgacctggctacaccgctcgcggtgttcggcgacgtggtactcgtgctcagcctgcgcgcgctgccacggatcaacaatccgcttgcctatttccttggcctgatcagtttctttgctgcgagccagccaccgtcgctgatgttgttaggggcgctggccgctgccggtgtgctcggcgcgatcggcgccggtatcagcaacgtgctgcaggcgcgactggcgcgcgcagtttgagccggcttgtctgcgccgagcaggcaacgctcagccgagccggcgcgggatcgcctatcgctttcacgcgcgcgcccctcagaccacgttgatcgtgacgtcgatgttgccccgcgtggccttggaatacggacaggtctgatgcgcctcgtgcgccagggcctccgcggtctcgcgctccacgcctgggacgtgcacgttgaggcgcgcctgcaggcaatacgcatcgcccgccatgccgaggtcgacttcggcgtcgatggccacgttctctggcagtgcaatctttatcttcctggctgccaggatgcgcgccgtttcaacgcgcagctgctcgactgcacgtgcgggtgattgaccggtgttcagccggaactcgcggccgaagtggcgtgggctcatatgcacggaatctgcgagcctttcaaccgagaggtcttcgtgcaggtgggttcgccgaagattcgcaggaatgcccgccgcatgcgttcgggtcggtgaagcccgtcaggctggcgatgcgctcgacggtgagtcgatctgcgtctatcagggtttcttcgcccctgcgtggaacacgacgttctagcgtttgcgcgcgtagagactcggtggttggccgacgtgccggctgaacgcggtgctgaaggtagttgccgagccgtagccgacccgttcagccacttcggcgatcccgatgtcatggcgacggagcaggtccttcgccacggccatgcgccaggcgatcaggtattccatcggtggcattcccacggcgcgcgtgaagcgctcaaaaaaggtcgagcgcgacagcgctgccttcctggcgagttgggccaccgtccacgagcgcgcgggatcggcgtgcatctgccgcatcgctgacgcgagtcgcgtatcggtcaggccacgcagcagccccgggggcgcgtcctcccccgaagttgagcgcagcgcttcgatcagcagcacctccaccaggcgcgtgagcacgagctcgcgccccgacctccgttcacccgattcctcgctgacgagccgcacgattgccgaaagccgctcggcgccgcgcacatgcaccagcgccggcagcagcgacaccagcaacgcagcattggacgagtcgaagacgaagtagccgccgagcagtcgcacatcggggcgtccaccgcgcctgccgtgacgaacttcgcccatcggcgcgggcgtgactttggggtcgatgcgctcgggcgccaccggctcaaagcccgacaaggtgaagcccggcgttgccggcaggagcacgaagtcgcccgtctcaagcgtgagggcatgctggccgtcgacggcgagacgacaactgccctcgagcacggcgcagaagcttggctggccgaagtcagcgtagcgaacaccccagcggccggcgccgctgatggacttcgagaacacggcacgcggctgaagcagcgagatgacttctgacaggggatcgctcatcgccggacgattgcaaatgaaatctggacttttcattgtaggcagtccgtcgcatccccgctatcgttgccggcatccaaaccaccaccgaaaccctcatgaaaaccgtgctgattaccggctgctcctctggctatggccttgaaaccgcgcgccacttccacgcgcagggctggaacgtcatcgccaccatgcgaacgccgaacgaagaactcttgccccgatcccaccggatccgcgtgctggcgctcgacgtgacgaagcccgacagcatcgccgccacgcttgcagcgagcggagccatcgacgtgctcgtcaacaacgcgggcatcggcctgtttggcgccttcgaggccactccgatggccacgacgcgcgaggtgttcgagaccaacacgttcggcgtgatggcgatgacccaggcggtgctgccccagttccgtgcgcgcaggtcgggcgtggtggtgaacgtgacctcgagcacgacgctggcgccgatgccgatggtagccgtctacaccgcgagcaagatggccatcgaaggcttcaccgcatcgctcgcgttcgagctcgaagcgttcaacgtgagcgtgaagctggtcgagccaggctacggaccgaccacgcgctttaccagcaacgggggaccgcgcatggagggcctgatccccgaggcatacgcgtcttgcgcgcagggcatctttgcttccctctcgcaaccggcagcggtgacgaccgaggccgaggtggccgaagcggtttggcgtgccgccaacgacaggtccgggctgcttcggtttccggcaggtgccgatgcggtagcgctggctcattcgggataaccgtcgaagggtctggcccttcgacggtttgccgcaccaggtatcggagcccaatcgccccggaggctggcgcatccccacacgcccgaggcataatcgtgaaactggtttcaccgagacccgaaccctatgccgcgccctgttatccgacctgtgtccgaccagaaacctgcagagaaactcaccatccaggacgttgccgactatgcgggcgtgtccaaggcaaccgtatcgcgctacctgaaccggggcggcgagcagctttccgcggacgtggaggcgcgcgtcgccgcggccatccgcgcgctcggctatagccccagcccgatggcgcaggggctcaagcgcggcaagtcgcgcctgatcggcctggtggtcgcggatgtctccaattcgttctcggtggccgtgctgcgcggcgttgagaaggcctgtcgcgacgccggctacatggtgatgctgttcaacctcggcaatgacgagcaactggagcgcgaagccattcgctcgctgtcggcttaccgggtcgagggctttatcctgcacacgctgggccacgatgccggcgccctggccgatgcggcgcagttgggcaagccagtggtcctggtcgaccgcaaggtcggcgatgccgaagtcgacctggtggccctggacaaccagaccgccgtccaggaagccgccggccacctggtcgaagccggctaccggcgcctgctgttcatcagcgagccgatcaaggccatcagctcgcgcaacgagcgggcgcgcgcgttccaggcctttgtcgccgaacacgtggacacggttggagggaccgtttttgaagcccagcggggtgacgacgatgccctggatgaagcgctgcgcgcgctgcgccgtggcgccggacaggcacccgttgccgtgctggcggccaacgccgtgatctcgctgcgcgtggccgcatcggccgccagactagggtggcagcttggcgccgacctgggcctgatcggcttcgatgatccggaatgggctgcactggtcggtcctggcctcagcgccatttcccagcccaccgacgatatcgggcgcgttgccaccaactgcctgatagagcgcctgcaaggcacgcagctgccgccgcgccgggtgctgttgcccggcacgctggtcacgcgcggatcgacccgccgcgcctgatcgcagagcccttccccaccggcgcccgccgtgcccgcctgatccacgcctgcacccgctgcgcacgtccagcgggtgcctgacgtgcctgtttccacatccgccaaacgcagtttttgaccgtaagggtttccactgttggatctctgaaaccggtttcctataatcctgaaaccggtttcaaaacggtgcttgcccaacgctgcgacgccagcgacacattccataaacgtgcaggagacatgatgaacgtccaacgcttgttgcgccgcgcagccgcgcccgtgctgactctgctggtcctgaccagcgccgctttcaccgcccaggcgcagaccgtcgccgagatcgtcaagaagggcagggtcaccatcggcgtggtgaccggcgccccgcccttcggcaccacggacgccaccggcaagcccgccggctatgacgtcgacgtggccaacctgctcggcaagtacctgggcgtgccggtcgatatcgttccgctcacctcgcccagccggattccggcgctggaggccggcaaggtcgatttcctggtcgccacactggcgccgacgcccgagcgggcgcgggccatcatgttcagtgcaccctacagcgcgttcgagctgaccatcttcgcgcccgtcgctgccaagtacgccaggctgacggaactcgggaagaagaaggtgggcgtgacgcgcggcaccacgcaggacaccgcgctgacccggctggccgtgcccggcatgaacatcgtccgcttcgaggacgatgccacctgcgcgcaggcgctgatcagcaaccaggtcgaagccattgccctgcccaataccaccggcaacgagatcatgaaggcgcgcggtgccggcaagttcgacgccaagttcgcgttctcggtgcagcccaattcaatggccgtgcgccgcgacgccttcgagctgcgccagtggctcaacaccaccatctcctacgtcaagctgaatggcgaactcgacgccattgcgcagaagtggaccggcaaggcgctgcctgcgctgcaagcgttctgaaccaggccgtctgaggttgcgcgccggcgccagccggcgtgccaggagacccccatgaactaccaattcgaatggaccccggtgctgtcgcagctggaccgcttcgcggaaggcgcggcgatgacgctggcgctcagcttcggctcgatcctgcttggcacagtggtcggcaccgccggcgcgattgccgccgcttttggcggcccctggctgcagcgtgccaccagggcatatgtcgaagccatccgcaacacgcccttcctgatccagctcttcatcatcttcttcggcttgccaaccgtgggcctgcagatcgatgccgtcaccgccgcggtgattgccatgaccgtcaacctcggcgcctactcgacggaaatcatccgggccggcctgcaggcagttcaccgctcgcaactcgaggccgccgccgcgctgggcatgacacgctggcagctgatccgccacgtcgccctggtgccggctttcgagaaggtctatccggccctgaccagccagttcacgctgatgatgctgacgtcgagcgtggtgtcgacgatctcggtggaagagctgacggcggtcgccagccaggtcgattcgcagaccttccgcaccttcgagagctacatcctggtcatgttcgtctatatcggcctggcactgatgctgcgcgccatattcggcctgatcggcaacctcgtgttcaagcggcgccgcgtggtggcgcgcgcacgaaagctggcccgcacagcccgcatcgcgccaatggcgcaggcggaactgacggcagcggctgcagggagcgcgcaatgatcaccgagttctcctggaatcatcttgaaatcctgctgctggcagcgcgctggacgctgtgggtgaccttgctcgccttcgtcggcggcacgctggccggcttcctggtggcgctggcacgtacctccagaagcccgatgctgcgcctcgccagcacggcctatatccaggtcgtgcaaggcacgccggtgctgatcgtgctgttcctgagctactacggactctccgtgctcgggctcaagctgtcgccgatggtcgcggccatgctggcgatgtcgatctacgccagcgcctaccttggcgagatctggcgcggctgcatcgaggccgtgccgcaaggacagtgggaagccagtgaagcgctcgccctcacccgctggcagcagctgcgctatgtggtgctgccgcaggccgtgcggctggccttgccgcccacggtgggattctcggtccagctggtcaagaacacctcgatcacttccatcatcggcgtcatcgaactgacccgcgccggccagttgatcaacaacgcgaccttccagcccttcgcggtcttcgtcgtcgtcgcacttatctacttcgcgctctgcttcccgctgtcggcggcggcgcggcgcatggaaaggaggctccatgtcaatcgttgaagcacaaggcgtgcacaagtcatatggcgctgtcgaagtcctgaagggcgtttcgtttgcgatcgagccgggccaggtggtcgccatcatcggccgcagcggctccggcaagagcaccatgctgcgttgcctgaatggcctggagacgatcaacgccggcgacatcaccgtcgccgggcacaagctggatcacgaccgcaagcgcttgctcgacctgcgccgcgacgtgggcatggtgttccagagctacaacctgtttccgcacctgaccgtgggcgagaacatcgcgctggcgccgtccatcgtgaagaagatggcagccagcaagatcgacggcatcgtcgaccaggtgctgacccaggtcggcctgctcgacaagaaggactgctaccccgagcagctctcgggtggccagcaacagcgtgtggccatcgcccgttcgctggcgatggagcccaaggtgatgctgttcgacgaggtcacctccgcgctcgaccccgagctgacagcggaagtgcttcgggtcatggagaacctcgctgcctccggcatgaccatggtgctggtcacgcatgaaatggagttcgcgcgccgcatggcgcataccaccatcttcatgcaccagggcaaggtccacgaggcggggccatcgaaggcgctgttcgcgcagccgcggacaccggaactgcagcaattcctcggcgcgggagcactgaaatgagccattggcaagcagatgctgcttcgcgcccgccggtgctgatctcgttgacagcctatggcgccgacttcgccctgcgcgacggacaggccgcactcgcgcggattgccgcggcagccggcgcggacggcgtggaatttcgcggcgaactccagcgcgggcacaaggatgaagtcattgaacagcgcgaggtcgcccggcagcatgggctgagcgtagtctggtccagcccggaaggcctctggagcgaagccggcagcctcgatgccgccgctctcgaccgtgccttcacgaccgcgctggcgctcggtgcgacccgggtcaagatgtcgcttggcggctatcgggaaggcacggcactggaagcactgcttccctggctgcggcacgatggcatcgaactcgtcgtggaaaacgaccagaccgcccaggccggcaccgtgccgccgttgcgcgatttcttcgcgcgtatcacggcgctcggcgagaacgtgccgatgaccttcgacatgggcaactggcactggaccggcgaagacccgctcgacgccgcgcaggtcttcggcgccggcgtcggctacgtgcactgcaaaggcgtgcagcgcacgcctgccaaatggatcgcggtgccgcttgatcagtcggcggcaccctggcgcagcgtcttgcgccgcctgcccacgcacgttgcgcgtgcgatcgaattcccgctgcaaggcgaagacctggtgcaggtcacgcgccatcatgtcgaactgctgcgttcggtggaggtccccgcatgagcaccgatcttgacgtggtcacgctgggcgaggcgatgctgatgctggtcgccggcgaagccgggccgctcgaaggcgcgcagaccttccacaagcgcaccgccggtgccgagaccaatgtggccatcggcctgtcgcgcctgggcctgaaggttggctgggccagccggctgggcgacgactcgatggcccgctacctgctcggcgaaatgcagcgcgaaggcgtggattgcagccaggtggtgtgcgagcccggtgagcgcaccggtttccagttcaagggccgggtcgacgacggcagcgatccccccgtcgaataccaccgccgcggctcggcggcgagccgcatgaacccggagcacctggacggcaggtggctgcggcgctcgcggcacctgcacgtcaccggcgtgttccccgcgctggccgcaggcacgcaggccgccacgcgccaggccatcgccaccatgcaggccgccggccgcacgatctcattcgatcccaacctgcggcccacgctgtgggcctcgcccgagttgatgcgggagacgctgaacgacctggcgcagcagtgcgactgggtgctgcccggcatcgaagagggccgcttcctcaccggccacgccgagccggaacgcattgccgccttctaccgtgcccgcggcgccaggctggtggtggtgaagctgggcgccgacggcgcctacttcgatggcgaggccggcaccggccatgtcgaggcattcagcgtcgagcatgttgtcgataccgttggcgccggcgatggctttgccgtcggcgtgatcagcgcgctgctggagggccggccagtgcgcgacgccgtccggcgcggcgcctggatcggcgcccgcgcggtgcaggtgcgcggcgataccgaaggcctgccgacccatgcccagctggcggccgccagtttgtgaagccactgcaaggattacccatgcgcaagaatgtcctggtgttccgcccgattcctgatgacctgctcgccaggatcgaatcggagcacgatgtgatcgtggccgacccgcgccagccggcacaactgcctgccttccgcgccgcgctggcaaacgcccatggcctgatcggctccagcgtgaagctgggcgcagcggaactggccgaagcgggccagttggaggtgatctcgagtatttcggtcggagtcgacaactacgaccttccctgcctgcaccggcgcggcatcaccctgtgccacacgcccggcgtactcaccgagaccaccgccgacactgtcttcgcgctcatcatggccacgagccgccgcctggtcgagcttgcggcgcatgtgcgcgaaggccgctgggccgccaacatcggcgagggcctgttcggctgggacgtgcacggcaagaccctggcgatcctgggcttcggacgcatcggccaggccgtggcgcgacgcgcggcgctcggcttcggcatggaggtgctctacgtcaacgagaccgcggcggaaccgcgtgacctggtgggacgcgccacccggacggatctcaacgatgccttgcagcgagccgatatcgtcgccgtcacgctgcccctgaccgacagcacgcgtggcctgatgggcctgcgcgagttcgcgctgatgaagccgggcgccatcttcgtcaacggcgcccgcggccagatcgtgcaggaagacgcgctgctcgcggcgctcgacagcggccacctgcgcgcggccgggctggacgtcttcgccaccgagccactgccgcaggattcaccgctgcgcagccatcccagggtgacagccctgccccatatcggctcggccacgcatgagacccggcgcgccatggccgaactcgccacgcgcaacctgctggacgcgctcgccgggcggcagcccgccgcgcgcttcgacctcgcggcctttgccgcccgggcagccgcctgatacggacacgctgcctcacttccgcaggttggtcctggccaccagtaccttcatcaccgcgttgtctgccgcgatcatcgccttgaaggtcgccgcgtcggcataggcaatcccaaggttctgccggcccagcgccgccacgaagacagggtccgccaccgccttgcggctggcggccgcgagggtttcgagcacttcaggtggcgtgcccctgggcgcggccagtccgcgccatgtgccgatcgagaggtcgataccgcgctcacgcagcgtcggaacgttctcgaagcccctgacacgctgcccggccatcaccgcgagcgtcttcaccttgcctgcggccacataggccgatacttcggccggactgacggccaccgcgtcgatatgcccgcccatcaacgccaccagggccggcgccgcaccggagaacggcacatgattgaatttgacgtgcgccttgtcctccagcgccgtcgccgccaggtgccagatcgagcccgggccggaattcccgacctgcacctcccccgggtgcgccgcggcgaatgccaggaacgcctcgatggtgttccagcgcgagtcggccttgaccgtgatcgccgacggatcggcattcaggcgcgcgatcggcaccagctcggcggcgtcgagggtggtcggcccgagatgcgggacgatcacggcttccgcgatgatgatgccgagcttgtagccatcgggcctggcgcgggccacttccgtcatgccgatggcgccgctggcacctggcttgttcaccacggtcagcggctgcggcaggtactttcgcatggcttcgctgaaggcccgcgcaaccgtgtcggtaccaccgcccgccgtgcttggcaccacgagttcgacaggatgatccgggtagggcgccgcgggcgcctggccgacgacggcaagtgaggccagcagggcggccatgtgaaacagcttgcggggcgatcgcatctatggctctcaattcagggggggcggagaagttgattccgttgggggaagcctcggacacacgacgtgaaagaccatcgcatcccggatatgggttcttgtccgagagcgcggattttgccaaagccgttggaagggacgggttgggcatcgggcctaccgcggcttcgatccggcgcatgggcgacaaggtcagcgccaaacgcgccatgatcgaagccggtgtccccggcgttccgggctccgagggcgcaccgacagattctacgccagccccctggccgaagagacctactcgctgctcgaccgcacagtcgaagccggcgagagagtgggtggcttacctccgtgtcggttcagtgcggtgaacgccggagaacgcggcgtgccaggcgcgcagcttgccgacagcggtacgctggttcgctaacgggctgactccttccttgccgcacgcgttctagcggccttgcgggccgcttcggagcgaccggcagctcccttggtgctggcggccttcttcgcggcagccgagcgatcggtcgccgtgcgcttgcttgccgcgctcttggcctgggcagacagcgccttgggagaagcaccggcggtgctctcgcgcttgagtgccttgagcgcggcctgggaccgcttggccgtgctttctgaactcgcccgtcgcggtgcagccttggcggcagcagccttggtttccgccttggtcgcgcccttctttggcggcacatcgacgccagcgcggcgtgcctccgacaaaccgatcgctatggcctgcttggccgagcgcacgccgtgcttaccctttcgcacggcttcgatctcgtcgtgaacgaaatggccggcctgggtggtcggcgacttgcctgctctcttgtctgccctggctttggctatgctcgatgcccttggcatggtcgtctccatgacggccgcggtcatccggcacgggccatggcagatgcaatgtccgcggcgctgttcagggcccgccatctgccggcgggttaaaaaaatccctcgcaaatgtcgttccaggcgtgcaactggcgcgccactgccactcatagaggcgacggttgtactgccgcgtgcgaaatctgcacaccttgggccaaatctaccctgcgagacgcggtctacaccaggcaacgcggcgcctggaattcgatcacgtccttgatgacatcgcgcatctccgtgatcagcaggcgcgcgtcgtcgcgacgccattgcacgacatagtgcagcggttccagcgcgccgcccttcttcagtatctgcaacaccccgcgcgcttccagcgcttcggcccactgccttggcatgaaggcgaaacccagcccctccgccaccatgccgaccacagcgccccagctgttgcacaccaggcgacggttgaccgccatgccacgggtggccagccactggtcgagcacccgggtgccgcccgcgccgaccggcagggacagcagcaattgctccgccatcagccgccggggatcgtcggtgccggtctggtcgataaaagactcgctcgcgacccagacaaagtcgacctgcgcgatccgctccgacgcgaggctgctgcgcgatgacggcccggcgatcaccgcgaggtcgagttcgccatcttccaggcgctgctccagcacctgaccgatatcgacgtagggctcgagctgaagctcggggtgccggatggccgtctgccgtaccagccggggcagccaggtcaggccgctcagttcgcccaggcccacgcggcaacggccttgcaggccacggctctgccccgctgactgctgcaactcggccgcgacccgcagcaattcgcggatgcgcggcagcatctgctcgccctgcgccgtcagttcggcgcggcggccgcttcggtcgaacagctgcacgccgagggaggtttcaagctcggccacccgcttggacagcgaagacacggacagatggcagcggtcggcggctaccgagaagttgaggcaggtcgcggcccagtagaaggcttccagttgcttgagggtcatgggatccgcgccgcgggcggcgattattagtttcctaaaagcgaaattatagcttcgttatttttcgcttttatcgattccctgcggttgctagattgaagcctcgtcgtcgccttggccccctatcgatcatgtcagctcttcatgcccctgctgcagaaaacgccgctgaccgcgccacagatgccgtcggcaccgcttccgcgccgcgcgtgacgactgcaagcgcaagcggcgcaggtaccttgcgccgccaagtgctttcgctgaacgaccttgaaccgctcgcccgccgccgcctgccccggccgctgtacgcctacgtcagcggtgcggtggaggacagcgtctcgctggcggagaatcgccgcgccttcaccgagatcgcgttgcggccacgcgtgcttgccggcgtggccacgcgcgaactggacttcgagctgttcggcaggcgctatgccgcccccttcggcgttgcacccatgggcatcgccgcgttgttcgcttaccgcggcgatatcgtgctcgcgcaggccgcgcagcaggccgcggtgccggcgatcatgagcggttcatcgctgatccggctggaagaagtgatggcagccgcgcccggcacctggttccaggcctacctgcccggcgacgtggcgcagatcgacgggctgttgtcgcgcgtcgaggcggcaggcgtatcgacgctggtgatcaccgtcgatacgcccgttgcgggcaatcgcgagaacaacgtgcgcgccggcttctcgacaccgctgcggccaagcctgcgcttggcatggcaaggcatcacgcatccgcgctggctgctcggcacttttgcgcgcacgctgctgcggcacggcatgccgcacttcgagaacgcctatgcgcaccgcggcgcgcctatcctgtcatcgcgcgtgctgcgcgacttctccgaccgcgcgcatttcacctggacgcaccttgaagccatccgccggcgctggcaaggcacgctggtggtcaagggcatcctgaccgcggaagacgccttgctggcgcgtcggcacggtgtggacggggtcatcgtttcgaaccacggcggccggcaactcgacggcgccatcgcgccgctgcgcgtcctgcctgagatcgtgcacgccgtgcccgacctgccggtgatgctcgacagcggcgtatgccgcggcaccgacgtaatcaaggcgctcgcgctcggcgcgcgttgcgtctttgtcggccggccgttcgcctatgcggcgacggtcgggtccacccccggcgtggcgcacgccatcgacttgttgcaggccgagatctcgcgcgatatggcaatgctcggcctgacccggctggcagacatcggccctgcctgcatccggcctgccgcttcactaccccacatgccccctcacccggagacttatcgatgagcacgcttcacggctttcgcatccaccccaagccggcgccgactgccagcaacgcgctgctggaacgctaccgcagcttcccggtggccaatgtcagcgacgcaatgtgccgcaccgtcggcaccacgcggctgcggccctatcaccggcgcgatggcgtcatggccggccgcgccctcaccgtgcgcacgcgcccgggcgacaacctgatggtgcacaaggccctcgacctctgcggacccggcgatgtgatcgtcgtcgatgccggcggcgccggtcccaatgccatcatcggcgagatcatgctggcgctggcgatcgcgcgcggcgcagcgggcttcgtcatcgacggcctgatccgcgacagcgatacgatcggcaaggagacgttgcccgtgtatgcgcgcggggtctcgcaccgcggtccttacaaggacggtcccggcgaattgcatgtgcccgtctgcatcgacggcatggtggtgcgccccggcgacctggtgctgggcgatggcgacggcctgctggtcgttgcggccgaggatgccgaggaaatcgccgcgcgcgtggagaacgtacaacgcaccgaagcagcggtgctcgagtcgatcgcgcaaggccgcgccgatcggagctgggtcgagcgcacgctgcgcgaaaagggggtggtcgtatgaacgcgcccgtcctgctgatgcctgccgccggcacggtggtccgtttcgaccactggctggacgcagcctttgaccgcatcattacggccacgccaggcctgacgctgcacacctgcgcccgcgaaggcgccgacgcggccgcctgggaccggctgtccggcgcccatgtctaccagatctcggccgccaaggacgagatcccgcgccgctggttcgccgacgccgcgctgctggcgcgctgcccgaacctgctggcggtgtcgtccagcggctccggctgcgacaccatcgacatcgatgcctgcaccgaggccggcgtcgcggtgctcaaccaggccggcggcaacgccgactcggtggcggagatgacgctgggcctgatgctcgcggtactgcgccgcatcgccgaatccgaccgcagcctgcgcgcgcacaactgcgagagccgtgaggacctgatgggccacgaactgcgcggccgcacgctcggcctggtcggcgtgggccacgcgggccgccgcgtcgccgcactcggccgcgccttgggcatgcgcgtgatcgggtgcgacccggcgctggatgcggcggagctgtccgcacgcggcgcacaggccgtgtccttcgaggaattgctgcgcagtgccgacatcgtctcgctgcattgcccgcgcgatgccaccacgctgcgcatgatggatggcgccgcctttgccgcgatgcggccgggcagcatcttcgtcagcaccgcgcgcggcggcatccacgatgagggcgcgctgcatgcggcgctggccagcggccatcttgccggcgccggtctggacgtgtgggaccaggagccgccaccacgcgcccaccccttgctcgcgctggacaacgtcgtcgccaccttccacaccgctggcgttactcacgaggcacggcgcaggaacgccgaactggccgccactcaaatcgtcacgctgctgaccagtggcgagcggcccgagcggctggtcaatcccgaagtctggccgcgagcgcgcctgcgcattgcggcggtgatgcaggctgccgccctgtcatcggtcacaccttagcccccgattccgcagactattctttacacataacacgctggcataccagaccggcgaggagacaccaaccatgcacccgacccaagaccaatggcgccggcgctttccccttcgcctggccggcgcgctcgcgctggcctgcggcctcgccgccgcgaccggcgcacaggcagaggcgccctatcccaaccgccctatccagatgatcgtggcctacggtcccgggggcgggacggacctggtggcacggttgctggcccgccacctcgagaagcaactcggcggcgccacggtggtggtgcagaacaagcccggcgcgggcggcgccatcggcttcgccgaactggcacggtccgcgccggacggctacaccatcggctttatcaatacgccgaacctgctgaccattcccatcgagcgcaagaccaccttcacctggcgcagcttcgacctgatcggcaacctggtcgacgatccgggcggcttcacggtgcacaacagcaacggcatcgactcgctggccgcgctgatccgccatgccaaggcgcatccgggggaggtgtcagtcggcaccaccggcgtcggctcggacgaccacctcgccatgctgctgttcgagagggccgcgggcgtcaagctcacccatgtcggctacaagggcgcaggcgacgtgcgtgcggcgctggtcgggcagcagctcaccatcggggccattaacgtgggcgaagcgctgcagtaccagaaaggcggctcgccgatcaagttccttggccaaatgggcgcaacacgggcaacgctggccccgaacgtgcccaccttccgcgaacagggcttcgacattgagctggcttcgctgcgcggcctggcggcgcccaagggcctgcctgagccggtcaggaagaaactggtggaggcgatggcgcgcgtggtcgcggatccgcagttccgccagcaggccgaagcgatgtatgcgccgttgcactatctggcgccggccgcctacagcgcggagctggagcgcggggagacgggcttccgtcagctgtggaaagagatgccgtggcaggagaactgagctttgctgcaaacgctgggggttcctcgccgatcaggttctccgccggaatctccaggctacgactggctgcccgagcaaggcgccgagcttgttcgacacgatgcgcgccaccacgtcggtgctgccgccggcggcgaagcgtacgaccaggcggacgggatggtcaggataagcagcctaggcgtgcgcgctgaacgaaatgagcgcaccgatccctacttgagcaagcaagcgtttcatgtctcttccacgaagatagttttgattgggtggcgcattgcgcgtcgacaccctttgaaacgatggtagcgagcaaccgtggcgacggtgaaatagaaaattccgctgctgctatcaaggggcggcatgcctggggcttctactgcggtgttaacccgaagcttgctccgcgggcgccgcgtaagcgcaagtacgccgcgcagccatcgtcgcgcggcgtacattcagggtgcaacggaacgcaagcgctggcgcgcttgccgcctgcaggatgtcagtcggcctccaccttcatcgtcttcagcagcggctgccacttgtcgctttccgccttgagccaggtgcgcagcccttccggcgtctgcttgtctaccggcacaacctccgcacccaggtcgtcaagccgcttggccacggcgggatccttcagtgcctgctgcagcgccctggtcagcctggcagtgacctcgggcggcgtgcccttgggcgcatagatcccgtgccacaccttcatcgagaagcccttcaggccgccttcctgcagcgtcggcgcattgggcagtgccttgatgcggctaggcgtcgtcacgccatacagcttgacgcggttggcgttgatatgcggcagcgtcgaggtggtctggtcgcacagcaggtccacctgcccgcccagcaaggccgtcagcgcggggccggtgccctggtagggaatggaagtcatcttgaccttgactgcctcctcgaacagcaggccgcatagctgcgaaaccgcgccaaggccggcattggccagcgagaccttctccttgttctgcgagacatacttgatcagctccgccgcgttggccggcggcaggtccttgcggcccagcagcgtcatcggcacatccgccacctgcccgatgtactcgaagtccttcatcggactgtaggagagcttcttgtacagcgccggcgccgtcgccatgccattgtggtggatcaggatggtgtagccgtcgggctgcgcccgcgccacgaatgcggccgccaccgtgccgccggcgccgagcttgttctccacgacaacgctctgtcccagatccttcgacatggcctggccaagggcccgcgacaccacatcggtcgggccgccggccgagaacggcaccaccagcgtgatgggcttggacggataggcatccgctgccagcgcccccgcggaaaacgccagtccaagcgctccgcacatgatccacttcataccggccagcgtggccttgcccgcttgaacgcacatatcaccgtctccatgtcgccggcacgctgactgtgtcgcgccggtcggtttatcaaacagcgctagagtgcgggatagcggcaccggaggacaatccggatttatcgaacgggccatacggccaggccgaacgcacgccagccgaccacccggtcgggaacttctgcccgaagtcgcaggtctcccgggccagcatggcgagggacgacacaagcttgctgcgctggtcactcttgcagatggcggcatccgcccgccaccatggcgcatcttccggcgcaggtcgaggcttcatgttcagctctccatcgccacgcgcccacggcactggtccgcttgaaatcgcctgaaattttcaaccaatgaaaatatatggcattcgtttgacgctcgttcgctcccctccctaagatctcccgcacagagtttccctcaacgaaaccagatgcgcgcgcaccgcctcgcgcccaggagacaacccgatgcagcgtcattcccgccagcggcgtgccatagttgcggcgctcgccaccctgcctgccttgtgcgcctggtccgcaccggcctgcgcggcagaggcatttccttcgcgtccgatccggctggtggtgcccttcacgcccggcggcaccactgacatcctggcgcgcctggttgcgcagaaggccggcgaggcgctgggccagcagatcgtggtcgacaaccgtccgggcgcgggcggcaacatcggcgctgaggccgtggcgcgcagtgcagctgacggctatacgctgctgatgggcacgttgggcacgcaggtgaccaaccagttcatttacccgcgcatgccgtacgacagcacccgggacttcgtgcccgtgacgctggtcgccaattcccccaacgtgctgcttgtcaacagcacgctgaacgcaaggtcggtgggcgaactggtgacgctggccaggcgcgagccgggcaagatcaactatgcctcgaccagcaccggcgggtcgccccacctgtcaggcgagttgctgaacatgatggcgggcgtcagcatgcagcacgtgccgtacaaaggggccgcccccgccatgacggacctgctcgcgggccaggtcaacctgatgttcgacaacctgccgtccgcgctcgcacagatccaggctggcaaggtgacggcgctggcggtcaccagtgccaggcgggcctcggtgctgccttccgtgccgaccgtgcgcgagtcggggctgccgggctatgaagtcaattcctggttcgggctgctcgcgccggccggcacgccgcccgagcgcgtgcgccggctccagcaggcggtggacaaggtgctggccacgcccgacgtgcgcaagcgcatcgaacagcttggcgccgagccgggcggcgaaggctccgccgcgttcgcggcgcagatcaggagcgatacggaaaaatggtcgcgcgtgatccagaccgccggcatcaagccgcaatgacgcggctgggcagcgccaacccctgacacaggacaatcatgaccaagaccaacacccttcgcatcggctcgggatcgggctggtggggcgaccgcgtcgagccggccgagcgttcggcgcgcctgggcaagctcgactacctgtgcttcgagaccatggccgaggccacggtatccgccgcgcaggtgcgcaagcggcgcgacccggccttcgccggctacgacacctatctcgacgaacgcatgcgcgcagtgctgcccccgtgcatcgccaatggcacgcgcatcatcagcaaccagggctggattcatccgctcggcggggcccggcgcgtggccgagctctgcgaggaactgggcctgcccggcgtcagaatcgccgcggtcaccaccacggacctgaccggaagcatctgcgagctggatctcaccctgctggaaagcggcgcaccggtttcctcgctgcgtgaaaccctgatcagcgccgaaccatacgaaggcgccgaaccgatcgtcgccgcattgcgcgcgggcgcgcagatcgtgatcaccgggcgcgtggccgacccgtcgctgttcctcgcgccgatgatccatcatttcggctggtcgccggacgacgtgactcggcttgcgcgcggcagcgccatcggccatctgctcgagtgcggcgcgcaggtgacggggggatatttcggcgaccccggctacaaggatgtgccggaaccatggaacctggccttcccgatcgccgaggtggaggccgacggcagcgccgtgatcggcaaggtggatggcagcggcggacgcatcgaccagcagaccgtcaaggagcagatgttctatgaggtccacgacccgcgccgctacatcacgccggacgtggtggtcgacttctcgaccgcggtgctcgaacaggtagggccggaccgcgtgcgtatcagcggtgtgagcgggcagccgcgcaccgatacgctcaaggtgtcgctgggctgcaccgaagggcatatcggtgaagacatgttcttctacgcggggccgggttgcctggaaaaggccaggctggccaaacgcatcctcgaagcgcgctttgccatggcaaggttgcaggcggatgaggtgcgcatcgacttcctcggcgtcaacgccgtgcacggcgcggcctcgcccgaacctgtctgcgagcccaacgaaatcgcggtccgcgtcgccgcgcgcacccgcacgcgcgacgaagccgccaaggttggccgcgagatcgacggcatggcggtctgcggcctggcctccaccggcaagcgcgtgccgcaccaggagcgcacgcgcgagatcatcggcgtctggtcggcactggtgccgcgcgcgttgatcacctcccaggtccactatctctgaggattcgccatgcgtgtaccactgcgacgtctcgcacacagccgctccggcgacaagggcaatacttcgaacacggcggtcatcgcctacgcgccggagttctacccgcatatcaaggcacagctgacggcacccgcgttcaaggcgctgtacggcacgctgatcacaggcgcggtcacgcgccatgaagtggatggactgcaggtgctcaacttcgtcgcggagggcgcgctcggcggcggtgtgtcgcgcagcctcgcgatcgacaactacggcaaggcgctggccagtgccgtgctgcgtttcgaagtcgagatacctgacgcgctggccggcctgctgcgcgggccggcgtcataggctcgccggggtaggcgtcagccaccgccggactggcgccccctggcacgccggccgtcggtgcatgcgtcggcccgcggcggtatcacggtgcgcgtccaggcgctggtgatgcgtcgcgcctcttgcttgagcttgcgtgccagcgcggcctcgcgcgagcggatacgcgcgctcgtcgccgccacgctcaaggcaccgatcggccggccctcatagtcgagaatcggcaccgcaatgccgcccatgccgtcgaccacccaatcgagaaacagcacatgcccgcgcgcccgggctgcctcgatttccgcggcgatgcacgcggcatcgagccgcgggtgcttgccaagcttgcgcgtggtctgctgcagccggcgcgcgcgctcgggcgcgggcagccatgccagcaccgccaggctgccggcgcccacgccgagcggccggcgcgtgccgaccgtcacgtagttcgcccgtatcgcatacgtgccgggttccaggtcggtgcacaccgcctcgccacggctggcctcggtcagcacggcggtatcctcgaacgcctccaccagccgttccagcgccggacgcgccagcttgcgcaagtccacgcgccgctgcgccacgtctgccagctggaagatctcgggcccgatgccgtagcggcgcgcctggtcgcgcgtggcgaacccctcctgcaccagcaggtcgagcatgcgcgaagccgtggccggatcgagcccggtggcgcgcgccacgtcgctcatgcggcgcacttccggatcggacagcgcgcgcagcacggccagggcgcgctggatcggggatgggcgcgatggcacctgccgggccccctcaggcaggcccggcgccagggcggcgctcaaccatgatgcgatgctgccagggtatcgcgcttgatcttctttgccagcgaccacttgtggacttcggtcgggccgtcgtagatgcgaaacgcacgcacttcacggaagacctgttcgacaatggtgtcgcgcgacacgcccatgccgccgaggatctgcacgcagcggtcggccacgcggaacaaggcatcggacacggccaccttggccatcgaactctcggccgtacccagggaaccgccgtcgagcaccccggcgcaccagtcgatcatcagtgcggcctgctgcaggtcgatcaggttctcggcgagcatgaagcccacgccctcgtggtcgatcagcagcttgccgaaagccttgcgcgtggtggcgtaggcgcgcgcgatctcgtcggcacgcgccacacccccgaaccagcgcatgcaatgcgacagccgcgccggcgacaagcgaacctgcgcataacggaagccctcgtccacctcgcccagcacctggtcctgcggcacgcgcaggccgtcgatcaggacctgcgcatgtccgcccggcatggaactgtcgatggtgtcaagcaggcgttcgatgcggatcgccggatggggcaggtcgaccaggaacatggtggcctgcgcgcgctcaccatcgccggtgcgcgccatcaggatgccggcgctggccccttcggctccggtgatgaacttcttgcggccgcggatcacccattcgtcgccgtccctgaccgcggtggtctggagcatcgacggatcggaaccggccccgccttcttccgcaggttcggtcatgaagaatgcggagcgggcctcgccgctgaccagcggtgcaaggaagcgctgctgctgtgcctccgtggcgaccttgcccagcaggaacatattcccctcgtccggggccatggtgttgaccgcgaccggcccgaggggcgacaagcccgagcgcttgagcacggccgcggtttcgagctgggtcaggtgagagccgtcgggcaggatatgtggcgtcatgacgccggccgcgcgcgccaggtcgcgaagctcggcgaccagcccggccgtcgggccatgggcttcgcagcgcacgtcgcgctcatagggcaccacgacgtcgcggacaaagcgctcgacgcgatcggcaatgacacggcttctttctgtgggacaggcggtgaacatggtgagcctcgttgtcaggacaggatcagattgtagggcggcacgccgccgggccgctgtcacggaaggccgttcgcacaaggaacccccgacatctggtctgcagccctttgcctgtcgagcgacaaagtaatcgcattgcgattactagtatgtggatttcacctatacatatgctcatgacaatcgactagtatggcttcaatcgagcacgagggcacaaggcgatgtcacttgtattgaagctgaaagacctgttgggacccgatgcggttctcaccgaacccgcggacgtagccgcctacatcgaggactggcgcggccgttataagggcccggcgctgtgcgtggtgctgccggcctccaccgcgcaagtcgccgcggtggtgcaggccgcggtccaggccagcgtgcccgtgctgccgcaaggcggcaataccagcctgtgcggcggcgcggtgccggccccggacggcacgccgcccatcgtcatcagcctggcacgcatgcggcgcatccgcgccatcgatgcggccaacaactcgatggaagtcgaggcaggctgcgtgctggccgcgatccagcaggcggcggcggaacaggggcgcctctatcccgtgagcctgggcgccgaaggctcctgccagatcggcggcaatatcgccaccaatgcgggcggcaccggcgtgctgcgctatggcaacacccgcgacaacgtgctcggccttgaagtggtcctgcccgacggccaggtctggaacggcctgtaccgcttgcgcaagaacaacaccggcctcgatctcaagcacctgtttatcggctccgaaggcacgctgggcgtgatcaccgccgccacgctcaagctgcacccgctgcccaccgcgcacgccatggcgtggctggcggtgagcacgccgcaggcggcgctggagatgctgggacgcttccagcagcgctgtggcgccaccctgtccgcgtttgaaatgctcaatgacgtgcagttgcagatcgtgctcgatcacgtgcccggccgccgtgcgccgttgcctgccagccatccctggcacgtgctggtggaacttgccgacaccggccggcgcgagctgctcgaccaggtgctgcaggaagtgctggagcaaggcgtggccgaaggcctggtcgacgatgccgtggtggccgccagcggcgcgcagcgcgaagccatgtggcaggtgcggcatagcgtctccgaaggcaacaagaaggcgggcctgggcctgaacaccgattgcgccgtgccggtctcggcggtgccgcagttcattgagcgcgccaccgcggcggcgcatgcggtcctgccggacttgccgatcatcgtcgtggcccacctgggcgatggcaacgtccacttcatcccgctggtgcctttcccgcagtggcaagcgctgccagagcgcgatgccgtggccgcccgcatcaagcacgccatcgaccaggtggcctacgaactgggcggcaccttcagcgcggaacatggcatcggccaggtcctgaccgaggaaatggcgcagttcaagccggcggtcgagatcgccatgatgcacggcatcaagcgcatgctcgacccgcgcgacctgttcaaccccggccggctgctgccgtccccaccttcccagcaataacggcaatcaaggagctcgcatgaacgaccacagccccatcaactcttctcgccggcgtgccctcaaggtcgccgctgccggccttggcacgcttgccgcgcccgcagtgctgcaatatgcgcgcgcgcagtccaagcgcatcgtggtgcgcgacgacggcggcatctacaccaaggcctacagcgcggtgtactacaagccgttcaccgagaagaccggcatcgaggtcgtgggcgtgcaggccaacgccgaaccggtggcgcagatccgcagcatggtcgagacgaggaactacacctgggacatggccaagatcagccagccggccatcctgctgctgacgcagggcggcaaggtctacctggagaagcacggcctggagggcgacgccaccatcaagaccattccggcgcatttcatgtcgccctacggcgtgggcaccaacgtctacagcacggtcctggcctatcgcaccgacgccttcaagggccgcaaggcaccgttgtcgtgggccgacttctggaacgtcaaggacttccccggccgccgcgccctgcgcaagcacccgttcgacacgctggaagagtcgctgatggccgccggcacggcgacctccgcgctctatccgctcaatatcgaccaggccatcgccaacctggagaagatcaaggccaacgttgacgtgtggtggaactccggcgcccaggtagagcagatgctcaagtccggcgaggtcgacatggtggccacctgggtgtcgcgcgcacagagcgcggccgcctccggtgcccaggtcggcatcgtctggaaccagaacctgtggggcgtggacaactggtccatcctggccggcacgccgaatgcgcaagcctgccgcgaattcatcaagttcgcgtccgaccccaagcgcatggcctcgctggtggagtacttcccggcaggcgtgacccagccggatgccttcaagtacatcaagcccgaggttgcgaagaactgcccgacccaccccgacaacatcaagtcgggcgtgcagatcaacgccaagtactggctcgataaccaggccgcggtgatggagaagttcaacggctggatcctcaagtgatctgaacctcttcaccagacaccacaagcaacgacacgatgccgaattccaaactcaagatttccgggctgaccaagcgttatggcgacttcgtcgcgctggccccgaccgaccttgaagtggccgagggggaattccttaccctcctgggcccttcgggctcgggcaagaccacgctgctcagcctgatcgccgggctggccgtgccggacggcggccagctgctgatcaatggcaaggacgtgacctttggcgccccctacgagcgcgatatcggcatggtgttccagaactacgcgctgttcccgcacatgacgatcgcggagaacatcgccttcccgctgaagatgcgccgggtcgacgcggccacggccaggcgccaggcactggaagcactggaaatggtccgcctgccccacgtcgcggcgcgcttcccgaaggaactctcgggcggccagcagcagcgcatcgcgctggcccgctgcctggtctacaagccatcgatcatcctgatggatgaaccgctgggcgccctggacaagaagctgcgcgaccacatgcagctggagatcaagcgcatccaccgcgagctgggcaccaccatcgtctatgtcacccacgaccaggaagaggcgatgacgatgtctgaccgcatctgcctgatgaacggcggcaagatcgagcagcttggcacgccgtcggacctgtacttccgcccgcgcacgctgttcgtggccgacttcctgggcgaatcgaacctgttcgagggcaccgtcacggaagtgcgcggcgaccacgtggaggtggcgctggcacagggcggcgccgtcgcccacgcggtcaccaatgcgccggtggccgccgggggcaaggtgcgggtcatggtgcggccgcagaacatcgccatggccaacggcgtcaccgccgccaatgcggtcagcggcaaagtgcttgacagcatgatcaccggcagcctgaccaagctgtacgtggaatccgatgccgccggccaggccccggtggtgctgtcctaccccacctcgatgggcgcttcccggcatgcggtcgggcagcaagtcacgcttacctggcagcgcagcgacgctgtcgccgtcccggattcgctatgaccgccgtcgccctgcaacgccgacccctaccctggctgcggcccgccttgctggccgcgccgctggtgctcctgttcgtggtgctgctggtctacccggtcggccagctgctgctgctgagcgtctacagcgacggtgccttcacgctggccaagtaccgccagctgtttgcgtcatcggtctacgtcgacgtgatgctgatcacgctgaagatctcgctctggaccacgctgctctccgtggtcgccggttatccggtggcctacctgatctcctcgctgtcaaaggacaggaaggcaaagtggctgttctgggtactgctgtcgttctggaccagcttcctggtgcgcgcctttgcctggatcgtgatgctgggccgcaacggcgtggtcaaccagttgctgagcgccgccggcatccaggatgcgccttccaacctgctgtacagcctcggcgccgtgctggtggcgatggtgcacgcgctgatgccgctggcggtgctgaccatgctgtcggtgatggagaacatcgaccgcaacctcccgcgcgcggcgcttacgcttggggcacggcctggcacggcgttctggcgcgtctacttcccgctctcgatgccgggcgtggcggccggcgccatcatggtgttcgtcaccgccgtcggcttctttatcgtgcccgcgctgctgggcggacgcaaagagatcatggtcgcccagctgatcatcgaccaggtgcagcagaccatgaactggggtttcgccggctcgatctcggtgttgctgctgctggtcgtgctggcggtgttcgccctgtatgacaaggtgctcgggctctcgtcgatggcaggcggagcggagcaacgcacccgctccgcggccgcgcacgatggcgtgctgcatcggctcggtgacagcgtgctgggcgcactgggagcggtcagcgacaagctgctggcactggtgccgcgcggccggcgcgagccgcagccgggcgactcgctgccgctgcgcacgatcgtgctgatggtgctgctgttcctgagcgtgccggcgctgctgatgatcccgctgtcgttcgccgacaagtcggggctgaactggccgccgcgcggcttcacgctgcagcactaccaggacatgctcgcctcgccgctgtggatgcaggccgggctgcgctcgctgctggtcggccttggcgccgcggtgctggcgctgctggtcggcacgccggtggcgttcctgctggcgcgctcgcagatgcggggcaagtcgctgctgctggcgttcgtgctgtcgccgatcatcatcccgcgcatgatcatcgcggtggggatgttctacttcttcgccagggtcgggctggtcggcacctcgctcggtctgatgatcggccacaccgtcattgccgtgccctacgtcgtcatgacgatgatggcggtgctgcgcaactacgacacgcggctcgacctggcggcgcaaagcctgggcgccaggccctggcagacgctgcgctacgtgacgctgccgatcctcgccgccggcctgttctcgtccttcctgttcgccttcgccacctcgttcgatgagctgacgatcgccctgtttgcctctggcggactgagcgccaccctgcccaagcagttctgggacgaggtgacgctgcagctttcaccggtgattgccgcggtgtctacctgcctgttcgtcttcgttaccctcctgatcacctgcgccgagcgcttgcgccgcaagagcgccgggcgctgagaaccttatccatgaacaacaagcttaccgccgccgacctgcgcggcatcttccccgccatcccgacgcccgtgacggccgacgacaggatcgaccaggacgccacgcgcaagctgatggcctacctgctggccaacggcgttgccggcgtggtgccgctgggcggcaccggcgaatacggtgccctgtcgcgcgaggagcgcgtccgcatggcagccctttgtgtcgaagcagcggctggccaggttcccgtcattcccggcgtgctcgacccggggttccacgatgcgctggatgcgggcaaggcctttgccggcgtcggcgcctctgccctgatggtgctgacgccctattacacctcgccgacccagcaaggcatccgcgactacttcctgcgctatgccgacgcctcgccggtgccggtcatgatctacgagatcccctaccgcacgcggatcgcgatcgcgcccgaggtgctgcacgagctgtcgcgccacgaaaacatcatcggcatgaaagcctgcaacaccgacatgtaccacttcctcaaggtggtggcgggtgtcgacgacagcttcagcgtgttcagcggcgaggacagcctgttcccgctgcacatggcggcgggtgccaggggtggcgtggtcgtgaccgcctccgtgctgccgcgcacctggcgcaccatctatgagctcggcgtggccggcaataccgcgcaagcggtacgcctgcaccgccagctgattccgttgctggacctggccttctccgaaaccaatcctgggccgctgaaatccgtgctcgacctggtgggcgtgaccgcgcctaaggtgctggcaccgctggtagcgccggcacccgggctgcaggcacagctgcgtgccgaactgacgcagcggctgcaagccgaggccgccctcgcctgaggcgccgacgatcatgctgccggccatcaaggactatcgggacctggcgcggcgccggctgtcgcgcttcgccttcgactatctggagggaggcgcggaggacgggcgcacgctggcacgcaacctggccgcataccaggcactgctgttccggccgcgcgtgctgcgcgacgtcacggagaccgatcccggcatggagatcttcggccgcaagtaccgcctgccgttgctggtgggccccacggggctgaacggactgtactggccgaaggccgaagaggcgctggcacgggccgcacacgctgaaggactgcccttcgtgatgtcgactgcatcgacctcgctgatcgaagacgtgcgcgcagccagcgacggcgacctgtggctgcagctctacgtgcagcgcgaccgcgccatcgccgagagcatgatggcgcgcgcacgcgccgccggcttcagcacgctgatgctgaccgtcgacaccatggtgcacggcaagcgcgaccatgacatccgcaacggctttcgcatgccggtgccgtggacgccgcggctgctggccgacctcgcggcacatccgcggtggtgcctgcgcatgctgcgccagggcggctcgccgcagctggtcaacctggcccgcagcagcgggatggccaacgacctgaaggcgcaggcggcgggattgagccggcagatggacatgtcgctgtgctgggacgacatcgcctggctgcgccggcactggcacgggcccgtcatcatcaagggtatccttacgccggccgacgcggaaatcgccgcccgccagggcctggatggcatcgtggtcagcaaccacggcggccgccagctggaaggcgcgcccagcgcggtcgagatgctgcccgccatcgtcgcggcggcgggcgggatgcacgtattcgtcgatggcggcgtgcgccgcggcgccgacatcgccaaggcgctggcaatgggcgcccgcggcgtgctggtggggcgcgcaccgctgtacgggctggcggcgcgcggtccccgcggcgtggcggaagtcctggccatcctgcgtggagaattcgagaccacgctgcggctgctcggcgttccgcaggcagccaggctggacgctgccgcgctctcggacgaccatgccgcgcggctggccgcactgtaagccatgaaaacaatgacaaggacgagcaggaggttgtgtggattcaggtaatgaaggcaacgggctgcgcacaaggcgcgagcgttcgtccctgttcgtcggttcggtggaaaaggccttccaggtgctggaagccttccacggcccggaccgccgcctgatgtcgatggcggaaatcgcccgggcggccgatctcgaccgcagcgccacccagcggctggtgcacacactggaacagctgggctacatccggcgcctgcccgattcggcgatgtatgggcttgcgccgaaggcactgggcctgtcgtacaactacctgcgctccaacgacctggtcgagcgcgcatcgccctacctgctcgatatcagccgcacgctgggagaaaccgccaacctgcaggaactcgacgggcacgaaatcgtgttcctggcccgcttccccgggcagcacctgatcaacgtcgatttcggggtcgggtaccggctcccggccgtgtacaccgcgtccgggattgcgatcctgtcgaagctgcccgaagcgcagcgcctggaggtggtgcgggcgaccgcactgaaccccatcacgccgttcactgaaaccgaccccgacaagctgatgacggcgatccgcgaggccggtgaacgcggctatgccgtggccatgaaccagaccgtggtcggcgacatctccgtcgcagccgcaatcaccgaccaccgcgggctgccggtcggggccatcaatatctcagtcccgtccacgcgctggacgctggaaaccgcccaggccaagctggccccgcatgtgcaagtggcggccatgtcgatctcgcaggcaaagcggatgagtttccagacggcatgagcgatgccggaaacgccgccggcttcgctcagatggcccggcctccgtcaacgggcatgtcgatgccggtaaggaagcgggcacccgggcttgccaggaagaccgcggcattggccacgtcggccggctcgcacattcgccccagcggtatggtggcaacaaagcgggcgcggttctcggcggtgtcggcaacccccatgaagtcctgcagcagcccggtcgccgccatcacgggcgagatcaggttgacccggatcccgtgcgcggccagttcaacagccatcgatttcgacatcacgctcaccgcgcccttcgagctgttgtaccaggtcagccccgggcgcggccggtggctgccgaccgagccgatattgaggatcacgcctttgccgcgctgcttcatcagcggcacgaccgcgcgtgccatgtggtagatcgacttgacgttgacggcgaagacgcggtcgaagaccgcttcgtcgacttccagcatcgactgattccgatgcgtggtgccggcattgttgacgaccacgtccggctcgccgaaatggtcgcagcagtgctgcaccgcggcgttgatctgcgccgggctggtgacgtcgcacggagccgcactggcattcggccccaactcgtccgccagtctctgcacggcatcgcgatcgatatcggccagcacgaccttcgctcccgcctggataaaggcccgcgcaatcgcggcgccaaagccactgcctgcgcccgtgacaatggcaacctggtctgatagctccgacatgtcgtctccctattggtagtgctgcacgatggtcttggtggtgctcatctcttccagcgcgaggaagcccttttcccggccgtacccgctcttcttgacgccgccgaagggcagttcgaccccaccgccggcaccgtagcaattgataaagacctgcccgctctgcagccgctggctgacccgcatctgccggctgccgttctcggtccacacgccggcgaccaggccgtagtcggtggcattggccagccggatggcatcctcttcgtccgtgaacggcatcaccgacagcactggcccgaatacctcgatattcgccagcgcgtggtcgcgcggcaccggaccgaacaggaccggcctgacgaagtacccaccccggggcaaatccgccgcaaacccgccttcggcgataaccggcacgccgctgtcccgcgcggcctccaccagccccatcacacgccggtactgccgctcgctgacgatcggcccgcaatccagatcggcggccggcacgcccgcctgcagggcacggaaggcctgcgccaccatgccgacgaagcgatcgtagatgccttgctgcaccagcagccggctgcccgccgagcaggtctgcccggcgttctggacaatggccttgaccacggccggcaccgccttgtccaggtccgcgtcgtcgaagacgatctgcggcgacttgccgcccagctcaagcacgcaggggacgtggttggccgcggttgcctgctgcaccagggcgccggcctcgggcgagccggtaaaggtggcgaaatggatgccggggttcgatgtcagcgcggcgcctgcctccgcgccatacccggtcaccaggttgagggctccgggcggcagcccggcttccatggcaagctcggcaatccggatcacgctcaggcacgcatcctccgatggcttcagcaccgccgcattgcccatcgccagtgccggcgccagcgtgcgccccatcatctgcgccgggtagttccagggaatgatgtgggcggtcacgccatgcgggacgcgcaccacgctcacgttgtatccgtccaggtacggaatcgtctgaccgtggaccttgtcggcggcgccaccgtagaactcgaagtacctggccaccgccctggcatcggcgcgcgcggccgagatcggcttgccggtgtcctgcgcctcgattgccgccagctcttccgcgtgatcgagaatgccttgtcccagccgctgcaggatgcgcccgcgttcggtcgcggtcttgctgccccactcgccctgcaaggcatcctgcgccgcgctcaccgcctgctgcacatccgcggcgcggccgcggctgatcttcgcaaacgccatgccgtcactgggatcgatcacgtcgatggtctcgccatcgatggcgccgagccatttccctccgatgagtaacgtcttcacccgccgctcctgaacagcacatctatcgtcaccgcggccactcccggcctgtgcgcctcgcgcaggccagcggtaccgcctcagcccatggaaatcggtctgctcccctactggctccgcgcaagcgagcccggcgactccgactccttcatgaactccgcgtcgttgtagtgatagagatcgtccaggtagggcacgaagaagtcatagaacgagcgcgagtcatacctgatctcgtccccgggcctgacgcattccggaatcggcccgacattggcgtcatcgtccgggtagaagaagaaggtcagcgcatagcgcttcatcggcggattgaccacgcggtgcggcgtggcgatgaagcggtcgttggacaggcggttcaggatctggccggtgttgacgatcagcgcgtccttgacgtagctgacactcagccactcgcgcgacggggtcatgacctgcaggccgggcaccggggtcatcggcagcaaggtcaggaagctgccgtcggaatgcggcgccagcgcgtactggccctcgtcgaggtgttcctcaggatggtagtaggcgcagcgctggtagtattccggcgccttgaacatgctgtcgaaatagtccgcgcgcagctccagcgccctggcgtagatgggcaggaacttcagcgccaggcgctccatcgacaactggtagtcgtacagcgtctggcggaactccggcaggctctccggccactggttcaggccacgatgacgcacattggcccgcaccttggggtcgtcctcggtgcggttgcgcatgaaaagccaggccgaattggtatccttcttggtgttctccgcaatcttggtccggatcgcctcggacttcaggatggatgccttcggcggcaggtagccctggtggtgatagccgacccggtgcctgagcttctcttccatcgggatctcgaagagcttggcggtctggcggaacgactcgtcgatcagggcgtgcgggatgccgtgattgatcaccgagaagaaccccagctcctcctggatcagcttgacgtcggcggccagttgctcaagcgcgccgggcacgccagccaggtaggggcccaggtcgagaatgggcaggtcggtcccgcgcgctatggctgcgcgcacctgctctgagggagcggcctgcaacggctgggccgcagcccgggatggcattgctgtcatgatcggtgtctcctatggtttgactgatacggggaacgtgctgccttgcccgccgatacggtggatcggcttgatcaaacttccactgcacacatctcacttccagaacgcgcatcgggattccgccctggaagcaaaggcctgctccccgggaatccgctgcacctccttgtagtagtcccacggctggcgtgattcagccgggctcttcacttccatcaggcgcagatcgtgcaccatgcgtccgtctccgcggatatagccgttctgggcgtacatatcgttgatgcgggtggccttcatgccggcgatcaccttcgcggcggcgtccgtgccggcagccttcaccgcgcgcagatagtgctgtgtcgccgagtagctggccgcctgcatgctggtgggcttcttcttcatcttgtcctggaaccgccctgcccacttccttgagtcatcgctctggtcccagtaccaggcttcggtcagggtgatgccctgggtcagtcccaggccgagggcgtgcacatccgtgatgaacagcatcagccccgcgatcttcatcgacctggagatgccgaattcgttggccgccttgatcgcattgatggtgtcgccgccgccgttggccagccccaggacctgggcccgcgatgccttggcctgcagcaggaaggaggaaaaatcggaggcggacaaaggatgccggacgctgcccaggaccttgccgccgccggcggtgaccaccgccgcggtctccttctccagcgaggcgccaaaggcatagtccaccgtcaggaagtaccacgaccgtccgccctgcctggtcatggcggcaccggtgcccctggccagggccacggtgtcatagagatagtggatggtatagggcgagcactcctcattggtcagctgcgccgccacgccgccggtcaccatgaccgggcgctgcttttccgctgcgaccttggccaccgccaggctggtgccggaactgggcccgctgatgatcatgtccaccccttgccggtcgaaccactcgcgggcctgcgtggccgcggtatcgggcttgccggcatggttggcgtggaccagctcgatgcgcttgccgttgatctcgccgccggcatccgcaatcgccatccgcactgcctcgaccaggccgttgccgcccatgtcagagtaaagccctgacatgtccgccagcacgccgatcttcaccgactcgtcgctgaactgggccgcagccggtccggccagggccaggccggccatgcccagcaacgcagccggccacctgatccgccttgcccggccttcaggcactcgttttctatttatccgcatctcccctcctgtcgacagattgcactgcatccgttcacgcccgcatcccgcctggtggcgctgcctctgccccggccgggctggccaatgcggacaggtgcgctttcctgagcctgcgcaactgccccggatttgcccgcacgctttccaccgtttcgaaatagcgccacagttccccgtctatgtcggcacgcagcctgatcgcgtccagcaggcggattaccgccagccgctcgtgccgcatcctgacgctgtgccgcagcagcgccagcgcggccgcccgcacatctggcacctggtgcgccggggtttcggcgcggccggcggtgcggatggttttcttgagtgccttgattctttcgcgcgacatggtgcttgcggctccggcgttgttcggactggcagcgctacgcgccaatggctttgcccagctgggtccaggcctgggacagctgctgccgcagtggcagggccaggaattcatcgtcctgattggcgaccacctcggcgacctggacctcgagcaggcgcttcagccggtagcgggcccgctgcctgcgcaaggccgcctgccgcccggcggcagccagccacgcctggtgccggtcgatggcatcggacagagcactgaccgaggcgggacgcgatgccgcggtcagcagcaccggcggaacccacgcgccctgcgcatgccgcgtgatggcgccgatgcgccggatatccgtggccatgcgctgggcgcccggcaggtctgccttgttgacgacgaagatatcggccatttccatgattcccgccttcatcgcctgcaccatgtccccactgtccggcaacaacagcagcaccagcgtatcgacctgcgcgcgcgccgcgtattccgtctggccgacaccgaccgtttccagcagcacctcggcaaagccgaagtcatccatcgcatccagcatctccgggaggttgtcagccaggccatccgaggtgccgcgcgagcccagcgagcggatgtagagttccgggctggtgccaagctcatccatgcggatccggtccccgaggatggcgccgccgctcctgggactgctgggatccaccgcgagcacgccgaggcgccccttagacgcgcgcgccatggcgaggtggcccaacagggtgctcttgcccgcgccgggcgcaccggtcatgccgatgcgcctggccggatgcagcggggtatcccgctgcgctcgctgcaccagctccgcgggcgtggcgttggcgatgcgggtcagcgtccggcccagcgcgccccggtcgagcgaggacgggttcatggcgccaccttgcccaggacttcatcgcgatgctcgtcaagcaacggcggcaggccatagctcggctcgtaatccgagaagcggatcgggcttgccaccgcgcgcagcggcaactcgccctgccccagcgccacgatcagcgagcgcgcagcggtgatgtcgctgcccaacgcctcattcaatgtgcccacctccgacaccaccacgccctgtggccccaggcgccgcacccattgcgccgccggggcggagcgcagcacctcggcaatctcgggtatcacctcggcacggtgcgcgcggcggcccgccatggtggcaaagcgcggatccgtggtccacgccggccggtccacctcctcgcagaaggtcttccagaagcggtcatgggtgatgaaaagcgtcagccagcccttggcggtcgggaagatctgtgcgggcaccaggtagggatgcgacgagtcggccagccgctcgatggtctcccccgcgttcagggcggccccggcaaggtagttgagctgtgacagcatcacgtcgtacatggccacgtccacctgcccaccccgcccctgcacgatcttcgcaagcaagcccactgcggcaaccaggccagccgagttgtccaccgccgagtagccggccttggtgggcggtgccgccggatctcccgtcaaggccatgaccccggtcatggcctggatcacatagtcgtatgccgggctgtccgaataggggccgtcaaggccgtagccggtgacggccacgcagaccagctgctcattccactggcgcagcacctcgtaggtgagcccgagcttgcgcaccgccgccggacgcaggttggtcaccagcgcatgggattgccgcaacagccgcccgagtgccagcgtccctgcctcgctggcgaggtcgagcaccacgcttttcttgttgcggttcaggctggcaaagtaggcattgtgcgggccgatgaaatgggggctgatggtgcggccgatatcaccttccggggtctcgatcttgatcacctcggcgcccaggtcggtcatcatcagcccgcagtagggcccggcaagcatgtggccgacttcgatgatgcggatgccggcaaggggcgcgctcacgccaggctcctgcccagattgctgaccaccgtctccagcggcatgtcggcggtaaacacagcggtgacccccagcgtccgcaggaagggctggtcctcggcgggaatggtgccgccgacaaagaccttgatgtcatgcgcattgagttcgcgcagctgggcgatgacctcccccaccagctccttgtggctgccagacaggatgctcaggccgactgcgtcaacgccctcgtcgacagcgacctgcgcgatctgcaatgggctgcggcgcaggccggtgtagatgacttcggcaccggcattgcgcaacgtcagcgcgatgatcttcgcgccgatatcgtggccgtccaggccgggcttgccaatcagtatccgcttgccggacaacgcgccggcggcttgcaaggtgttcataggttcaccggctccttgaattcgccccattgctgcttcaggcaagccaccatctctccgaccgtggcataggcatggcagcaatccaccagatagggcatgacgttctcgctgtccctggcggccgcggccgtcagccgggccagcgatgcgtccacggctgactgctggcgcgtatccagcacgcgctggaacttctccagggcccgctgcgcgacggtcggatccagcgtgaacacctcgccgacccggatctcctccccctccttcctgaagtggttctggccgacgatgacggtctggccggaatcggtgtccagcttgcgctgcaggccccgctcggccagccgcatctggatccagccatcctcgatggcagggatcacgccgccgtacgcctcgatctcgtccatcacgtggacgatctgcgcctccatccggtcggtgtgctgctccaggaagtagctgccgcccagcggatcgacggtccggccgatgccgctttcataggcgatgatctgctgcgtgcgcacggccagctcggcggagaactcggtcgggatctggaaggcctcgtcgaaggcacaggtgaagatcgactgggccccgcccagcaccgcggccatggtctccaccgccacccgcaccacgttgttgtaaggctggggcgccaccagcgacgatcccccgcagacgaccccgaagcggaaatgctgggccttcgcatccctggcgccatagcgctccttcatcaggcgcgcccagagccggcggcccgcccggaacttggcgatctcgtcgaagaagtccatgtgcacgtagaagaagaaggacaggcgcttggcaaacttctccacgtcgccgccccgggcacgcagctcgtccacataggccagtccgttggccagggtgtacgccatttcctcggccgcggtggcccccgcgtcgcgcacatgggcgccggcgatgctgatggggttgaagcgtggcgagacctcgttcgaatagaggatcgaatcggcgatcagccgcatcgacggccgcaccgggaagatccaggtgccgcgcgcgacgtactccttcaggatgtcgttctggatcgtgccggtcagcttgctgcgcggcacgttctgcttgtctgcgacggccaggtacatggcatagacgatcgcggccgtaccgttgatggtgaacgaggtcgagatccttgacaggtccaggccgtcgaacaggatctcggcctcgctcaggttcgacagcgacacgccgaccttgccgatttccggccgggccatcgggtgggtcggatcgaagccgcattgggtcggcaggtccagcgccactgaaaggccggtctggccctgcgccagcaggaacttgtagcgctcgttggactcctccgcggtgccgaatcccgagtactggcggatggtccacagccggccctggtagccatcgggaaagatgccgcgcgtgaacgggtagctgccggggtccccgatcttgtccggatggaccgccgccgcatccacgctcgccggaacctcgatgccgctctggctgaccggccgcaaggccggctcggcgcccgcatccgtcatggacagctcagcgttgctcattgggccctcctggagaggatgccctcggcagcgttccaatggtccgcatggagccaggtatgcaacagttgctgctgctcgatggtgcgggcagcgtcatgcgactcgccgcgccggctggccgcggtctgcgccttgatgccgcgcagcacctgcggggcgcagcccagcagcggttgcaggaaggcgtggatgtccttgccggcgggtccgtccgtgaccaccgcatcggccaagccccactgcagcgcctgctgcgcatcgacaagctcgcaacggctcatcatgcgcatggcccgcgccgcgccgacgatccggcacaggtcggggccgccgccccaggccgaggtgatggccagccgcgcctggataaagccgatgcgcgcgctcgccgactgcagccgcatgtcgcaggccaatgccagctcggcgccgccgccgatggcatcgccgttcaggtaggccagcaccggcagcgggcagtcgcgcaccgcatccagggcaccgcgcgcctgctcgctcatggccagcgtagcctcccggtcgcgcacgccggacagctcgaccagatcgccgcctgccgcaaagaagcgctggccggcgccggtcagcacgatgcagcgcaccccgggctgcgccgccgcggcgctcaccacctgcgccaatcccgccagcacgtggcgggccagcgcattgtgtttctgcgcccggtcgatcgtgatccatagcgcgccgccggcgcgctcctccacggtgatgtccttagctgcgtacacgctgttctgcctcccgactggtttgaatggatgctaggcgggggtttattccggcacaagaacgctagttccgtatctcgaacaaatgagtacaatgcagcggaatacggccacgccgccggcgtttgttcagccggccgaatttcttccagccaggtgcaagcgaaaggaggggactatgtccggcgtcacggtgaccgccatcgagcgggtgatcgatatccttgaagccttccaggcaaaccagcggccgctgtcgctgacggagctggcggaggcgatagacattcccaagagcacctgccacgccatcgtctcgaccctgatggcacgcggctacctctattccctcacccgtccgcgcgcgctctatcccacccggcgcatctatgacgtggcgcgcgacatcaccgagaaagacccgttcgtggaacgcgccacgccggtgctggagcggctgcgcgacgccacgcgggaaaccgtgatccttggcaagcggcagggtgaatccgtgatctacctgcaggtcatcgaaggcgtgcacgcgatccgctacacggccaagccgggggagttcaagccgctgcactcgagctccatcggcaaggccatcctgggcggcctgaaggagcaggagctgcgcggctggctggccggccgggaactgcccgccatcaccatggccaccaagaccgacccagaggccctcgtgcgcgacatccaggaaagccggcgcgccggctacttcgtcacgcgcggcgagaacgtcagcgacgtctgggccgtcgcgaccttcctcacgttgaacaatgagaccctggccattgccgtggcagggccgaagaaccggatggagacgtgcatccctgagtgcgcgaaagtgctggtggccacctgcagcttcctgtcgcggcaggtggcaggcaaccacgcgtgatggcgcagtgacgatgagccggctccgctacgcctcgctcgatgccctgctgaccgaagtgcgggcttgccgcgcctgtgcgccacacctgccgctgggcccgcgcccgatcgtgcgcgtcggggccgacgcgcgcatcctgatcgtcggccaggcgccggggatacgcgtgcatgaaaccggcattccctggaacgatgcgagcggcgaccgcctgcggcagtggctcggggtcgatgccgccaccttcctcgacgaatcgcagttcgcgatcatcccgatggggttctgctatcccggacgcggcaagagcggcgacaacccgccgcgccgcgagtgcgcgccattgtggctcgaccggctgctggcgcaactgccgtcgatcgagctgaccttgctggtcggccagtacgcgcagcgccatttcctcggggcgcgccgcaagccgacgctgaccgagaccgtcagggcatggaaggactacgcgcccggcttcgtgccgttgccgcatccgtcaccgcgcaaccagccgtggttcaagcagcatccctggtttgaggacgaggtgctgccgatgttgcgtgagcgggttggccggctgttgcggcacggccctgcgcaatcagggtaggcagcaagcgatacccgcgccaccgtcgcctggcccgctcacctcattcgctggccgtaaagcccgaagccgcgaccaccggtccccactgcatgcgctgcgcctggatgagcttgcgcagggcatcccccggcttgccgttcatctccatgcccagcgccgacatcttgtcgcgcaccacgggatccttgacggcgtcgagcagcgctttctcgatcctcgccaccgtagccggcggcgtccccgccggcacaaaggccgagtaccagcctgacgccgtctcgaaacccggcgcgcccgcctccgccagcgttggcacatcaggcagcagcgccgaccggcgggtcccggtgacgccgaggaaacggatcttgcccgcccggtacagctccatctgcccccccaccgcatcgatacccagcggcagcgtgccgccgatctcatcggtcagcatcatgacggcgccgcgataggcagtgggcagcaacggcacgccaatcgacttgctgagcgacagcaccccgaaatgaatgctgccgccgagcgtgaccagcccgacaccgcccttgtccgggttgcgcttcacccatgccaggtattccggcatggtccgatagggctggttgacgctggcggacgccaccagcggcacgtcggccaggtaggcgaccggaaccaggtccttgtcggggtcataggccaggcgcttgtaggtcagcggaaagatggtgaacggcggcgcgggcgagatcagcaccgtcttgccgtccggcggcgcgcgtttgacgttctccagcgccagccgcgccgatgcgccggggcggttctcgaccaggacaggcgtatcgagcgaaacacgcagcttttcagcaagcgcgcgcgcgaagatgtccagcgcgccaccggccgcgaagccgaccacgatgcgcacgggcgcgtcgccgctggcgggggcagccatggcaggaacggcactggcacccagggccaatgccagcgcggcggccagccgtcgcaaggggttcggaaatagcatacggattactccggttgacggcggcggatgcgctcaggcggcctcgagcgcagtgtgcacttccagcggatagatcgggcggcgcaggttgcggaacgggaactggctgtagtcagagctgcagactccggggccggccaccagcacgatctcgctggcgatcggctcgaaccctgcgcggaagtgctggcgcgacttgatcaggatgtacctgcggcgcgacaggtcgatgcccgcatgcgtgaacacgccggtatcgaacggctcctgcggcttctcgcagatcacgaccagcgtgccggcgacatccagcaccacggtgcggcccaggctcagcttcatgcctgtgaacatcgggccggtgacctggtagttgccgtcggtaatgcactgcacccggccgctcagccgcagcggacggcccttcaggtccagcgcgggcatgtcggtcttgccgcccacatccagtgtgacggactgcccgacgccggcggcaatcagttccgccaccgcgcccgggtcccagaacggcccggcgaccacgccttcgagcccctggcgcaggacttcgcccagcaccgtcatttcatccgtcggcccgccagcgccgcagttatcgccatggtcgaccagcacgaccgggccctgcgtgagcgtcttggcgcgcgcgatggattcctccatcggctcgatcggaaaaacaaaatcagcccggcgttcccacgccatgccgcagagctcgtcgagcaggcgccgccctgcgtcgaccctggcggcatccgccacgatcaccacggccaggccggtatgcgggatatcggcaagcggaaaaccaccaaacaccgaggcgttgagcacctcgccatcgcgctcggccgccatcgcacgctccatgatgtccttcatgggttgcgcgcgcggggtctggcgcagcatgtgggtgagcatcggcagcgtgcgccacaacaggaccgggcgggcctcgcctcgcagcgccgccatcagggtacgggcggcgcgtgcgccggtctcgtacacgtccacgtggggataggtgcagtagccggcgatcacggtcgcattgtcaaccagcgcagcgctgaagttggcgtggaaatccagcgataccgcgatcggcacctcgggcgcggcggcacggatgcgtgccagcagttcgccttcggcatccggatagccctcggccaccatggcgccgtgcaggtccagcatcacggcatcgcagcccgcgcccaccgcctcgacaatgctggccgccatcgactcgaatgcctgtgcggtcaccatgccactgggcaccgcgttcgccatcaggggcatcacgaactcgtcgccctggcggcgtaccaggtcgatgaacgcggccgcggcgctgttggtgccctggcacgcacgcaccgcgtcgtcgccgtagagcgggccagcggtgctgccgcggttgaacgcgctcaatggcgtggcaatcggcgaaaaggtattggtttcatgccgcatcagggcaatgacaaaacgcatggactggctccgacagcgtgaagggttcagttggattcgagatcgactgcgcgcgcaatggcgccgtagcggatcgtttccgcttgcaggaagcggcgggcctgctcgggggtggaaaggaccggctcataggcaagcgtctgcaggcgcgcggcaaagtccgcttcctgcacgctggccttcacttccctgtagagccggtcgatgaccggggccggcgtacccgccttgaccaccagcgccaggttgccgcgtacctgcagcacatccgtgccgcccgccttctgcgtttcgaggctgggaaactgcgtgacgggctccgcctgcagcgtagccaggggcctggccttgccatcctggacgtaattgaccgaagagccgatcacatcgacatgcgcataggtctggccgccgatcaggtccgccatggccggcggcgagccgcggtatggaacgatggtgaaatccaggccattgcggcgcttccagtcggccaggccgaggtgcgcagcccccgcgacgacgttgatgctgatcgacaccttgccgggattgcgctggatatgcgtcttcagctcgcccagagtcatctccttgcggtcggcgcgcgtgatgatccagtgcggcacggtgctgacgatggtcaccggcgtcaggtcggtctcggggcgatagcgcaggcccttgatcgtgaacggattgatactgagcgtgccgtcgctggccagcagcagcgtgttgccgtcggccttctccttgagcaccgacgacacacccggcacggtcgcgccaccggcgatgttctccaccatcaccggctgccccagccgctgttccagcttgcgcgcgagtgtgcggccgatgatgtcgtaggaaccaccggccgggaacggcaccaccaggcgcagcggccggtcgggccacgcgggtgcggcagttgcgcaagtggctgcgagcaaggctgcgccggcaagcatgccgcgcatgatcgagcgcaaatggctcatggtttccatgggtctcctcctgaggtctgattgcctcgtgatggcttggaatgaatcaggtgatgcgccgactatatgggatcggttccgataccaaaagcgaataaaaatcgctgtttgttgagcaaatggttaacttgtagaatgagccacccggccccgccgatcgtcgcctgcccccatgcccgccgaagccttcgcccataccctgcttggccgcctcaagctgcgccacctgcgcatcatgctggcgctgagcgagatgccaaccgccgcagccgtcgccgcgcgctttcatgtcagccccgccgcggtgtccaagaccctggccgagatcgaagacatcgtgggcatgccgctgttcgagcgcagccgccgcggcctgcacctgaccgagcccggacgggagatggcagcccatgcggcggtcttgctggcgcagctcgaacggctcgccgaatcgctgcaggcagtgcgtgccggcagccagggggcgttgcgcatcgcgttccggacaatgtcggtgcagcccttcctggcgcgggcgatgagcgacttctaccgtgaccatccgcgcgtggagatcagcgtgatcgaaggcggcatcggcgaactggcggatcaactggtggatggctcgctggacctgctgttcgcctatgacgatccgcgcctgtcgctacccgcgctgcgcacggcaccggtagtcccggcgcagaaggtggtgattgtcgccagcctggaccatccgctgctcacgcgccgcaagctggcggcgcgggaactgtccgggcagcaatggtgcattccggtggccggctcgcgcatgcttcacctgctgcacacggcgtttcataccctaggggcgccggcgccctcgctgggcatccgcaccagcgatgtggccgccacggccagcttgttgcaggctggtcatttcctcgcggtgttccccgagcgcattgccgcgcagctcaccctggccaaggtggcgcgagtgcttcgcttcgaactcggcagccgcgtggagccggtggtcgcggtctggaacgacgaactcacgccacgcacgccggcgcgcctgtttcgcgagctcgtcatgcgtcgcgccggcgagaccctcgtggccgagccagtgccgttgctggccgcgcgcgcggtggcggcggccggcgttcgcaagcgctgaacgggaagccggcccggctcagtgcgcgcacagcaccgcagccatctccctcgccgcgccctgcagcgtcggcaccgcctgcagcagcgcctcaagcgaagcccgcgcagtcggcgcatgacaggcaatcgcggccaccacccggcctgaaccctctccatccggctcgcgcaccggcactgccaccgcgcacatgccgcgcacgaattcctcgtggtccacgccgatgccgcgcgcgcccagccggtccagctcggtgttgagtcccggcacatcggacagcgtgcgcggcgtgtgcggggccaggtccagccgcctgagcatctgctggcgctccagccggttcatcgctgacaggaacagcttgccgctggcggtgcagtgcagcggcacgtggatgccgggcgacagctgcaggcgcagtggctcgtgcgtctcgacccgctccacatagaggacccggtcgccgtcgagcgcggtgaggttgcaggtctcgcccaggctcgccaccagcctggccaggatggcgcggcactcgcgcagcatcggcgggctcctgagggtctgcagtgccagcgacgcggcgcccgggccgggcacatagccgcgctcggcgggcatgcggaccacgaagccggtgcgctccatggcggccagcaggcgcatcagtgtcgccttgggcacatgcaaccgctgcgaaagctgggacaacgtctgcgggtgctgcgccctggccaggctggacagcaccatcagcacgcgcaggctgcgtgcatcgtcctccaccgccccgtcttctgctgcagtgcgattctgaaacgggaattgcacgttctgtttcacaaccggcgtctcctcgcgattgagctttccattccggctttgaaaaataaaatccggaacagaatgtttcagattatagatccaagccggatggttacgtgcctgccggccaaaaaaggagacagcgacgatgtcgcaaaccgttgactacatcgtggtaggcgccggctcggccgggtgcgtgctggccaaccggctcagcgaagacggccgctattcggtctgcctgctggaggccggcccgcccgaccgctacccgtggatccatatcccgatcggctatggcaagaccatgttccacaagcaagtgaactggggcttctatacggatcccgatcccaacatgctcgatcgccgcatctactggccgcgcggccgcacgctgggcggcagcagcgccatcaacggcctgatctacgtacgcggccagcgcgaggactatgaccactgggaaacgctgggcaatccgggctggagctgggacaactgcctgccctacttccgcaagctcgagaacaacgaccttggcgccggccccacgcgcggcaccgacggcccgctgaacgcgacctcgatcgaccggcagcatccgctggtcgatgccttcatcggcgccggccaggcgctgggcctgccccgcaagaccgacttcaacggtggcgaccaggagggcgtgggctattaccagctcaccacccgcaacggctggcgctgctccaccgcggtggcctacctgcgcccggcgcgcgggcgcacgaacctgcgcgtcgagaccgatgcccacaccaccgggatcctgttcgaaggcaagcgtgccgtgggcgtgcgctacacccagcatggccagccctatatcctgcgggcgcggcgcgaggtgatcctgtgcgcgggcgcgctgcagtcgccgcagttgctgcagctgtcgggcatcggcccggcgccgttgctgcaggacctgggcgtaccggtggtgcatgccctgccgggcgtgggcgagaacctgcaggaccatctgcaggtgcgactgatctacgaggtggccaagccgatcaccaccaacgaccagctgcgctcgctgacgggcaaggcgcgcatgggcctggaatggctgctgatgcgcaaggggccgctggcgatcggcatcaaccagggcgcgatgttctgccgcgcactgccgcaggaaagcgccacgccggacacgcagttccatttctcgaccctgtccgccgacatggcgggcggcacggtgcatcccttctccggctgcacctattcggtatgccagttgcggcccgagtcgcgcggcacggtgcggatccgctcgaccgatccgtatgagccgccgtcgatgcagcccaactacctgtcggccgagctggaccggcgctgcaccgtggcagcggtgcgctacgcccggcgcgtggcgcaggccgaaccgatgcgcggcctgatgaagcgcgagttccggccgggcgacgaggtgcgcagcgacgacgagatcctgcatttctgccgcgagtacggtgccaccatcttccatccgtcgggcaccgcgaaaatggggcccgccgccgatccattggcagtggtcgatgcgcgcctgcgcgtgcatggcgtgggcgggctgcgcgtggtggactgctcggtgatgcctacgctggtctcaggcaacaccaacgtgccggtggtgatgatggccgagcgcgcggccgacttcatccgcgaagacgcacggcgggaagtgcatcccgtcgacgtggcaaccaagatggcagcagccgcctgagcggcctgcgccaatcctgattgcgaacaaccaaggccaggcacccataacaaggccaaaccctgcagtgcatccggcgtccataaccatccttccagaggacgccgcccatcaccagaggagacaagcatgacaagccccaacgaacaggcgatccgcaaggtcgcgctggcgtccgtgatcggcgccaccatcgaatggtatgacttcttcctgtacggcgtggtcgccggcctggtcttcaacaagctgtacttccccggcaatgacccgctggtggccaccatgctggcctacaccacctttgcggtgggctttgtcacgcggccgctgggcggcgtgatcttcgggcactttggcgacaaggttggccgcaagagcatgctggtgatcacgctgatgatcatgggcgtgtccaccttcctgatcgggctggtgccgacctatgacagcatcggcatcctggcgccgatcctgttgctgctgctgcgcgtgctgcagggcatcggcctgggtggcgaatggggcggcgcggtgctgatggcctatgagtacgcaccgccgggcaaacggggcttctatgcgtcgctgccgcagatcgggctggcgatcggactgtgcctggcatccggcgtggtggcgctgctgtcgctgaccctgaccgatacgcagtttctggcgtggggctggcgcgtggccttcctgatctcggcggggatggtgttcgtgggcatgtatatccgcctcaacgtcaaggagacacctgaattcgccgtgatcaagcagcgcaatgccgagacccagattccctttgtcgacatgatgcggcgctacccgggcaatatcctcaagggcatgggcgcacgctatatcgacggggtcttcttcaacatcttcggcgtgttctcgatcacctacctgacccagaccatcaatatcagccggactgaagcgctggtcggcgtaatggcggcggccattgcgatgtgcttcttcattccgttcttcggccacctgtccgaccgcatcggccgcacccgcgtgtatttctggggctcgctgatcacggcgctgtccgccttcccggcgttctggctgatgctgaacagcggcggcaacaccatgctgctgtggctgtccatcgtggtgccgttcggcatcctctacgccgcggtctatggcccggaagctgcgctgttctgcgagctgttcgatgccagggtgcgatacaccgggatctcgttcgtctaccagttctcgggaatcttcgcctccggcatcacgcccatcatcgccacggcactgctcaagtcgggcggcggcaagccctggcagatctgcgcctacgttgcctttgcgggggtggtgtcggcgttgtcggtggcgctgatcggacggggcgaaggctcccaggcgccgcgtgaaaacggcatgccgctgcgcggtccggcgcgataggcgaggagcgggccgccgcccgccggcaatgtcttagaatggcgcaacgccaatgacagggacattgcatgcaaactccggacggcaccggtgcagccgccgccccgctcctgcccagggtcgtgcgccagcggctgcacgacaccgtggtcgaccacctgcgcaactttatcgtcgagggggtgctgccgccgggcatgaagctcaatgagcgcgagctgtgtgaaacgctgggcatctcgcgcacgccgctgcgcgaggcgctgaaggtgctggccgccgaggggctgatcgagatctcgcccaaccgcggcgcgagcgtgtcacggatgagcgaggccgaggcctgggaagccttcgagctgatgagcggcctggaggcgtttgccggggagctggcgtgcgagcgcatcacgccgccggagctggccgagatcaaggcgctgcactacgccatgctggcctgccgcgcgcagaacgacctgcccggctactacgcccgcaaccaggagatccacgaccgcatcgccggtgccgcgcgcaaccagacgctgcagcagacctacctgaccctcaaccggcggctcaaggcgatgcgtttccgctccaaccaccagaccgacaaatgggaccgcgccgtgcacgatcacgaagagatgatccacgcgctggaagcccgcgacggcaagcggctggcggccatcctgcgccagcacttgctggagaagcgcgccgcgctgatgcagatccatcccgacccgatcggcggcgcaccggcgatgccgaacgcctgaggcctggcacccttaagccgtcaggcggccgccccggcctcgggacgatccaggtagccgccgacgatacggaccagcagcggcagcttgccggtaaagaagtggtccgcccccggcaccactaccacgggcagcccctgcgggcgcgcccagtcgaacagcgcgccgagttccgcgcgctcgtcacgctcgccgtggaccaccaggcaatcggcgggaacggccggcgtgtcatagctgcggtgcgccttgacggtgccgtaaggcgtgccggcaagcaccaggtggcggatcggcacggaccgcgccgccagcgtggcggcggcattggccatgacgaacgcaccaaaggaaaagccggccagtgccagcggcaggccgggatgggcctcgcgcagatgggcgaccacggcgagcatgtcctgcgcctcgccgctgccctggtcatgctgccccgcggacccctcgaccccgcggaaattcggccgcacggtcaggaagccgcgtgccaccagcgccttggccaactggtgcggcaccttgtgcgtggccgagccgcccagcagcggatgcggatgcgcgaccacggcgatgcctcgcggcgcgccggcgggacggtccaccaacatttcgatctgcccggcctcgccgccgagctgcgccttttccgtgcctgacggaacagccatgccatctcctggtaatgaaatgggccgcctgcggcccgaaagaccgtgatggtaatgcgattcccgcagaccacgcgccaccgcgcgcgtatccgtatcaaaatgtcaccccgtgcgctatccgacacaaggaacggctgggtggcgtatccgctttcgtataatttcgcgaaccgcggcaaggccgtttttcgtgtcctctggtcccgccgccatcggtcagcacgtcccgtgtcccgcacaccggcctgccaggcagcccgccgcgcttcgtgccctgaccagacttcgctgaagggagcgccagcgagcggctcccttcccgtgttcattgccggtgctccggccgttcccgcatcccatcgccgccgcacccgacgcgtgccagcgcgatgccgttgccgatgccggggccgccgcaagtcaccatccgacgagattccgccatgagcaaagtttcacggctcgcactgggccttgcgctcgctgcgctatgccacctgacgccggccgcactggccgccccggcatcagaagcggcttccgaggccggcgcccagcaggcgcccgccatcagccacggcgaggccgccgccgaactcaagcgcctgcagaccgagcaggaccgcatcaagcagcaggcctccgacccggaaggcaacaccaggctgcatgaactcgaagaaacgctgcagaagctcgatgccgacgtcgacaagctgtcttcggcgctgacgccgcagcgggcgcagctgcaggcgcagctggacgtgctgggcccgccaccggcggccgccaccaccaaggaagcgccggcggtggtcaggcagcgcgccgatctgaatgcgcgccgtgcccagcttgacgcacaactcaagcaggcaggagagagcaaggcgaacatcgccaacctgagcgaccagctggcgcggctgcagcgcggccagatgaaggaccagctcgcgctgcgctccgagagcatcctgaacccgcagttctggaagccgctggtcagcccgacacaggaagaccaggcgcgcctggccacctttaccgaccaggtggtgccgatggcgcaactggcctggcagccgtcacagcgcgccgccaccatcgccttgctgttgctggccctggcggtatggaccctgggccggcgcctggcggaacgggcactggcgtggttctgcctgcacaagctgccggagacgcgcctgcgccgcagcgccctggcactgtccaccacgctggccaccgtgtgcaccaccgggctggcggtgcagctggtctacaacgccttcacgcgcagctatgaactgccgccggacctggtcgagctgtacggccagctgctcaagctgacgctgaccagcgcgctgatcgcgggcctggggcgcgcgctgctgtgcacgcgccatccctcctggcgcctgccggcgctggccgatccggtggcgctggcgatgaagccgttccccgccgtgctggccggcctgttgctgctggccggcacgctcgagcagctgaaccgcattgccgataccagcgtgcaggtcacgctgctgggacgcgggctggtctcgctggtggtggtgctgaccatcggcgccgcgctgctgcgcgccaaccgcgtgcgcaacctgctggcggccgccggcgagcggcccgaggcgcgcgccacgctggcgggcatgatccacgccggcgtgtcggtcatcgtgctggtgtcggtggtggcgctgctggccggctacatcagctttgcgcgcttcctgacctacgagctggtctggttcgacatcgtgctgtgcagcctgtacctgctgacccaggtcacgcgcgacgtctgcgaaagcctgctctcgaccaactacgccagcggccgtgtcatcaagcagctgttcggcgtggacgattcgcacctggagcaggcctccaccatcctgtcaggcatcggcgccagcgtgctgctgctggtggcggtgctggcgctgctgaccggcggcttcggcaccacacccgcggacctgctcaacagcctggtaatggtgctgggcggcgagaagctgcacagcctcaacatcatgcccgaccgcatcctgaatgcgctggtcgctctcggggtcggcatctggctgctgcgctcggtgcggcgctggctcgatggagaactgctgcccaaggtctgcaaggagccgggcctgcgcgcctcgctgattacgctgtacagcaatgtcggctacgtgttgctggtgctgctggtgctgtcgctgctgggcgtgcgctgggacaacctggcgtggatcgtcagcgcgctgtcggtgggtatcggcttcggcctgcaggagatcgtgaagaacttcgtctccggcctgatcctgctgaccgagcgtccggtcaaggtgggcgacatggtcagcattgccggcgtggagggcgatatccgccgcatcaacgtgcgcgctaccgaaatccagctgggcgaccgctccaccgtgatcgtgcccaactcgcagctgatctcgcagaacctgcgcaacgtgaccatgagcaacagcacccagggagtggcgtcgctgcaacttaccttccccctgaataccgaccccgaacagctgcgcgacctgctgctggacgtctaccgcgagaacgagagcatcctggacgtgccggcaccctcggtcatgttcagccagctggcgcccaacggcatcacgctgtcggtgacgggctatgtcggcagcccgcgcatcgccgccaacacgcgcagcgacctgttgttcgaaatcctcaagcgcctgcgcgccgcggacatctcgctgtcggtgccgcaatcgctgcggctggaaaacatgccgccattcgggcaggagcccgagcgcgcgctggccgccggctgaccggcattaaagcagccgttacaaccctaacaagtcgccggccgcgcagaaacaccttgaggggcgctttgcgtgcatcatgaatgcacacaagctgcatcagaaggagtccgatatgcgcccctccacccgaatcgtttcagcggttgccctgagcgtggcgctggtggcagccggcccggcatccgcgcgcggccgccaccaccaccacggcggcggctcgaatgccggagcggtgctggctgtcggcgcgctggtcggcctggcctttggcgcggccctggcctcgacgccggtcatggcggcaccgccccccgtcacgtacgcaccggctccggtgacctacgcgccggctcccgtctcatacgcaccgccggcagcgccgccggggtattgctaccgcgactacgaccgtgcctatgtgccttgcggcccgcagccgtcggggtattacgaacagcagcagccgtattacggctattgaataaggcggctgtgcaaaaaagaaacgccccatgccaagcatggggcgtttgtcttgtaacggctggcaagcgcgcagggttctgaatgaccacttgcgtgctccttctcccgcttgcgggagagggagcaaaccagcgggacttgaaggtctgtgctgccttacaccggcacatccctggtcggatccggcttgcgatcgtcaaaccagcgatacagcgtaggcaccatcaccagcgtcagcagcgtcgacgtaatcagcccgccgatcaccaccaccgccagcggacgctgcacttccgagcccggccccgtcgagaacaggaacggcaccaggcccagcatcgcaatggtcgcggtcatcatcaccgggcggaaacgctgggtcgcgccctgcaccaccgcttcatcgagcgacaaacccgagtcgcgcagcgtgcggatatacgacaccagcaccaccccgttcagcaccgccatgccccacagcgcgataaagcccaccgaggccggcaccgacaggtattcgccggtgacgaacagcccgatgatgccgccgatggaggcaaacggcagcaccgtgatgatcagcgtggcaaagcgcagcgagttgaacagcaggaacagcaggaagaagatcgcggcgatggtcaccggcacgatgatcttcaggtggcccatggcgcgttccatgttctggaactggccgccccactccaggtagtagccttcgggcaacttcaccttggcgtcggtggcctgctgcagctcggccacgaagccgccgaggtcgcggtccttcacgttgatcatcaccaccacgcggcgcttggccatttcgcggctgatctgggccggaccgtcgttgacctcgatcttggccacgctctgcagcggcacctgggtgccgttgggggtggacaccagcagctggcggatggcctgctcgttgttgcggaactcctccggcaggcgcaccgccgcggcaaagcggcgctcgccttcgaagatgtccgtggcacgcttgccgccgatggcaatctcgatcacgtcatggatgtcggacacgttcagcccgtagcgcgcaatcgcctggcggtcgatctcgatcgacaggtactgctgccccgacacgcgctcgatgcggatatcctgcgagccctggatgccgccggccacgcgcgaaatctcgcccgccagctcgcgcagcttgtccaggtcgtcgccgaacaccttcaccgccacgtcagaacgcacgccgctgaccatttcgtcgacacggtccgagatcggctgcgccatcacgatctgcacgccgggaatggccttgagcttttcgcggatggcgttggcgatatcgtcctgggtccagccgtcgggccactcgccgcggtccttaaggctggcgatcggagtcgactcgttctggccctgcgggtcggccggactttcgccgcggcccacgccggacaccaccgacttcacgcccggcacgctcagcaccagcttgttggcttccttctccagcttgatcgactcttccagcgagatgttgggcacgcggtcgagcgcgggcacgatcgagccttccttcatctccggaatgaacgaggtgcccagcagcggcacgatcgccaccgtggcaacgaaggccgccaccgcgcagatcaccgtcttgcggctgttgcccagcgcccagtgcagcaggcgcaggtagtggcgcttcatgaaggcgatcacatgcgtgtcgtgctcggcgccgcccttgagcaggtacgacgacagcaccggcgacagcgtcagcgagaggaacagcgagatcgccagcgcgatcgagatggtgaacgccagcggcgcgaacatcttgccttccatgcccgacagcgtcatcagcggcaggaacaccaggatgatgatgcccacgcccacgatcaccggcgtggccacctcctgcacggccttgaccaggatctcggtcttggtgaggcccggctccttgtggccgagccgctcgaacgcgttctcgaccaccaccaccgagccgtccaccatcaggccgatggcgatggccagcccccccagcgacatcaggttggccgacaggcccacctcgttcatcaccatgaaggtcagcaagggcgtcaataccagcgtggccagcacgatcaccgacgagcgcacgtcgcccaggaacaggaacagcacgatcaccaccagcaccacgccttccagcagcaccttggtcacggtccacagtgcggagtcgaccagttcgctgcggtcgtagtacggcacgatctgcagcttgcccggcagcatgccgcgctcgttgatctcggccacgcgcgccttcacgcggctgaccacctccttggcattgccgccgcgcatcatcatgacgatgccgccgaccgcctcggtctggccgttcttgaccagcgcgccctggcgcacctcatgcccgatggtgacgttggccacgtcgcgcaggtacaccggcgtgccgttgatctccttgagcacgatgctgcccaggtcatccacgccgcgggccaggcccacgccgcggatcaggtactgctcggcataatgcggcagcacgccgccgccggagttggcgttgttgcgcgccagcgcctcatacacctgctgggtcgagatctggtagtggcgcatgcgttccgggttgaccagcgcctggtactggcgcacgtagccgccctgcgagttgatctcggccacgcccggaatcgagcgcagcagcgggcgcaccacccagtcctgggcgatgcggcgctcggccagctcttcctgcgtcagttcgcggttgccgtcgtcggcacggtccagcgtgtactggtagacctcgcccaggccggtggaaaccgggcccagcaccggcgacacgccttccggcatgcgcccgcccacttcgatcaggcgctccatcaccagctggcgggcaaagtacacgtcagtggcgtcggtaaacaccagcgtgatcagcgacaggcccgccttgttcagcgagcgcatctcttccaggccgggcaggccggtcatggccatttccaccggcacggtgacaaaacgctcgacttcctcgggcgagcggcccgcggcttcggtggcgatctgcacctgcacgttggtgacatcggggaaagcatccaccgacagcttggtggcagcgcgcaggccgaagaagaacagcaccacggcaatcacgcacaccaccagccgctgcttgatggcggcttcgactagggatttcatcatggccgattacccttgctcgaggcgcttgcgctcgttgtcgagatggaaggcaccatcgaccacgatgcggtcgccggccttcacaccgttctgcaccacgcgcatgccgtcgctctcggcgcccagcttgaccttggtgaggcggtacttgttgcccggcatctcgacatagaccagctcgtcgttgccgtcgcgaaccaccgaggcggccgggatcaccagctggtcgaccggcttgccggcgatcagcatgctggccagcatggcaggcttgaggcggccttcgcggttctccagctcggtgcggaccagcaccgtgcgcgactgcgggttgaccgtgcggccgacgtagatcagcttgccggtgatgctcttgctgcccgcaccgttgccaagcgaaggcacctcgatgtcgacgctctgcccttcggccacctgggcggcctgctgctcgggtacctcggccaccacccacacgcgcgacaggtcggccacggtgtagagcgcatcggccggctgcaccacctgtccttgcgccacgttgcgctcgaccacggtgccgctgatgctggaaaacaccggcgaatgcgagttgatgctgccgctcctggccagctcggcgatcgatgcctgcgacatgcccagcacgcgcaactggtcgcggtaggcgcgcatctcggccgaggcaatcgccagttcgctctcgcggcgctgcagctcgccgcggccgatcacgtcggcggcaaacagctggcgcgcgcgctcggcgttgcgcccctgcagctcggtctgggcctcgctcttcaggaaggccatctgcgccgcgcccagctcgctgctgtgcaggcgcgccagcacctggccggccttcacttcctggcccagggtggcatagaggtcggtcacgcggccggtcacgctggcgccgatgcgggccacgcgttgctcgtcgaagtcgacgcggccggccacgcgcagcatctcgctgaacggggaagtagccaccggcgccaccttcagccccttctgcaggttgccctcgggctggatcacgccaggcggcagcttgggcgcttcggcaacaggttcaggtttgtcggagcaggccgccaggctgagcgtcaggacggcagcggccgtcagagaaagcaggaaattggggcgcatggttatttctgttcgatggtggaggtcggctgcaggcccggcgctgcggtagcgcccggggcggtcgacatgagcttttcgatctggatggcggccacctgcaggtcgtactgggcggcaatcaggtcattgcgcgcaccgcgcagcacgcgctgggcatcgaggtagtccaggatgccgcgctcgccgaagcggtaggcggactcggccacgcccagcgccgactcggcctcgcgcacgatgccggactcgagcgccgtcacctgggcctggttgatctcgtactggcggtaggcggcttccagctcctgcgtcagctcgaactcgcgcgcttccagggcgctgcgcgcctgcgtggcctgcgccgtggcctcgcccaccgggccgctgcggcggtcccacagcgggatggtcaggaccagcccgatctgcgagacgttgttgtcaggctggcggtcggtgctggcgcgcaccgccacctcgggccagcgcagcgacttctggtagttcacgcccagctgcgcgcgctccagctccatgcggcgctggaccagctcggcattgctggcggtcatggtgtcgcgcagcaccggcagcggcggcacgtcgggcgactggcccagggtgccggccagcgcaaactggcccggcatggcaccgcccacctgctggcgcagcgctgccttggcctggttgacacgcagcccggcagtctgctggctcttctgcgaggccagcagttcggtctcggccttgatcagttcatagcgcggcgcctcgcccacctccacgcgcaggcgcgcccgcgaatggatctggcgcatcatcgccaggtcttcctcggcggcatgcagctcgctctcgcggcgcagcacgtcgtagtaggcagtcttcacgcgggcggccaggtcggcccggaagccttgccgcatggcctgcgacgactccagcccgcgggtggccatggcctcgcgcagactgcgctggtgcgggtagtccagcttctgcaccacggcgtagctgggcgcattgccgctggtcacgcccggctgcttgccggacaagcggccgtacatcacttccacctgcgggttgggataggcacgtgcgctgctgattgccgcgctggcggcatcgacaccggcctcggcggcggccacgcccttgttggtggactgggccagctcgagcagttggggcagcgagtaggcgggtcccgcctgggcgccggccgctgcggcggatgcgggcttcggcaccgccgcagccgccaggatggcggagcccggcatgggtgcggcagcaggtttggtcaggggcgcgggggcggctggcgcggcaccggccgcgtccgttggcttcggggacaccccgccttgtgcgccggcatgggtcggtgcagcggcgagcgcgatcagcaaaagcgacgcgatcagggtcagcttggttgttgtcatgagtcgggaaagcaagcaatacggctgcctgtcgccatgctgccgcccgccccgggcgagcggtcgcttggacgcgatcacggcaggacgcacaacggcagcggcttgcccgcgcggtcaggcaacaggcaggctggcgatatcaggcaagggggcgcggcccgcggcacggaggcggcatgctgcagcgcgtgcggtgcgggcgcaggaaacgctcaggcgcgggaaatgggtggccggaagaaggccgaaggcggcggctcggcgcggccaggcggatgctgggcgacatcgccggagggcagcagcagcttcactggcggcaaggcaatcagggcactggattcctcgatctcgtcgagcaggtcgagggggtcgagcaggtccgccgaccagatattgcaatacccggggggcgggtcgtcgcagatatcgtcgtcatgcaagccgtcgtcgccgggcacgatgatgcggcccaggtcgtcgacaggctgtgccgccgccaggtccaccaggtcaacgctggcctgcgcctgcagcgccgcgcgcgcgtccgccactgctccgaaggagagcagcgacaggcacatggcagtcagcagcaggaacaacagtcgcattgaatcgggggcattgacggcatccgccggccgtccccagtcgggggcctggccggcaggatgctgcaggacagcattgtaactgaacgattacgattgacagggaatcgttacgttcgttcccttgctgtagagagatcgggcgcctgaaagggcttgcaaggaacgaccttgtccttccgcgccggcgaagaactggccgaccagactcgcgcgctggcaaaggcatcgggacaaaaaacctccgactacatccgcgacgccgtgcgcgagaagaacgaacgggaaatggcctcccgtatcgccgtgctttcccgcaagctctcggcaaagcacctggccgccagcgaggaaatggacgcatcggccggagacgggcttgactgagctgaaacgcgggcagatctgggaggtcgacctcaacccacagacccatcgggaagagccggccaagcgcaaccggccggcgctggtcatccagacggatttgctcaacgacgccggccacccgaccacgatcatcgtgccgggcacatcacaaatcgagcgcgaggattgctttccgttgcgggtcgcgctgggcaagctgcctggcctggcctatgagacggacctgctgatcgatcaggtccgagcggtgtccaatcgccggttcatcggcggccggccggtcgcgagattggggactgattacatgagtaaagtggaggaggcattgcgactcctccttaagctttgagctccctttcgcctctgcaccactgcatatcatgcagtgacagtgcatgatatgcagcgatggatggggaggcagccatgcacaactggctgcaagagcactacccgggcatgctcaaaacataacctgccaccgcgccctacgccaccctgaacccatgcgtcccgtcgcgctccagttgcgcgatcaggccgaactcccagtccaggtagccctgcatcgcctcgcgcgggttgtcagtgccctcatacggccggcggtagcggtcagtgcgttccgaggccaggcgcgtttccccgctttccagcggcagccccgctgcaatccacgcctgggtgccgccttccagcaccagcacttccgcatccgtcaggcgctgcaggtcggccgcggcaaagcgcgccagcaggctcgatccgcaggtgagcacgtagcgcctgggctgcgggatgcgcggcagcgcgtccgcaagctgcgcgcgaatgacgaagtaggcgccgggaatatggcgcttgacgtagttggcgctggtggtgaagtcgaggacagcggtgctgccgtcgcctgcgtcaatccatttggccagttcggctgcagtgacggtcgataccggcgctgacgccggcaccggtgcgctgaccgcgccggtttcgctacgttccgccgctgtcgccggttccaccacccagacgtcccagcccatctgcgccagccatgagccggtcatgctggcgcgcacgtcgtcatcatccgccagcacgatgcgcgcaccgcgcaccggagcggaatgatcggtctcctgcaccagctggccgcccggcgcgttgacaaagcccggcaggtggctgtctgcgaattcctcaggcgtgcgcacgtcgaagcggtacacagtgcgcccgggctgctgcagcgtttcgatctgggccagcgcaatgcggcgaacgccggcccggtcggcgatctcgcgcgcgccacggcaggcactgtcgcggttggcatcgctgaccgcggcgggcgcgcggcggctggcgccatggtccagttgctggccagccagggtccagccgatggtgccgttgcgcagcgccgccaccgggttgggaatgcccgcgttgaccagcgactgggtgccgatgatgctgcgcgtgcgcccggcgcagttgacgatcacacgcgtgttcggatcgggcgccagctcgcgcacgcgcagcaccagttcggcgcccggcacgctggtcgccgtgggaatgctcatggtctggtactcgtcgaagcggcgcgcatcgacgatcaccacatcggccttggtgtcgatcaatgcctgcacttcctcggcggcaagcgacggcgtgtggcgcctggcttcgacgacttcgccgaacgacttgctcggcacgttgacgtcgcggaacacctcgccgccgccgtcgatccaggcgcgcagtccgccttccagcagatgcacgcgcgtatagcccagctcgcgcagcacggccgcggcgcgcggcgccaggtcggtgccagcgtattcgccgtagacgacgatcagcgtgtcgcggcgcgggatacgcgcccacgcttcgatctcaagcttcgacagcgggaagttggccgcccacagcgggtgttcctgcgcgaaggggtcttcctcgcgcacatcgatcagtgcgatttcgtcgtggttgagcagggccttgcgcacgtcctcgggcgaataggtcgggaaaaccgatgcagcttgcgtagcagtaatcttggtcatgactgggcaacttcgcgggagcggtcccacaggttgggcagggtctggttggaatagccggagataaagggcttgcgcgtgccatcctcggcatagaccgaacggcgcaccgcgccgatattggcgccgtagacgtggatgctgaccgagacgcggtcgtcatgcacgttgttgacacggtggatatcgccgaccgtgggcgacacggcctcgacctgcccgggcagcaggcgcacggcatcgccatgcggcacgggccggccgccggcgtcgagcacgaatggctgcgagtcttccgcgccgcgcagcatgccgatcaggccccatacggtgtggtcgtggatgggcgtgcgctggcccggtccccagacaaagctgacgaccgagaagcgttcggcggaatcgcaatgcagcaggtgctgctggtagtactcgggatgcggctgggcccaggcatcgggcagccagtcgtcgcgcgcaaccagccttgccagcagcgccccgccttcgcgcaggatgcggggctcgtccggctgctggtccagcagcgcggccaggccggtgatgaagtcgcgcagcggcgcgagcgggttgggggtgggggtgctgcccatgggattgactccggagtgtctcgttctggtttgccggcgcggcgggcgcctgcgctgcggccatccgcggggcggtgctgctgcaaacatagcacggccaggcaggcccgcgcttacaggccaagctgcgcccgcccggcggcgaccaggatggaatcgttctgcggcgtatggatgcggctgcacagcacgtcgcggtagtggcgctccagcgggttgttccggctcaagccgtggttgccggagagctgcagtgccagttccaccgcgcggatcgcattgccggtcaccgtgtacttgagcagcccgctgtcggccggcgtgggcgcctcgcccgcgtcggtgcgcgcggcggcatcgtccagcaacacctgattggcccgcagcaacgcggcgatctcgccgatggcttcctgaacgcgcggcagcgtggccagcggtgcgcccaggctgccgggcgcgcgctcgcgaacgaaatcgccgatccatgcggcggcagcgcgtgccaccgcgtcatagaggctgcccagcagcacgatcatccagccctgctggtcggcgttggcgtcgatgtcggcctggctggcaccggtcggcgcccatgctgacggcgggcggatatcgaccgcgtggtcaggcgggatccagacgttgtcgagcacggtctcatggctgcctgaagcgcgcaggccaaggtggttccagttttcgacgatgcgcacgcccgcgatggcggccgccggtccgggcaccaggaacacgcccacgcgcggctgaggctcatcggtgcgcgcccagaccgccagccagcgcagcgccgggatgccggtgctgtacagcttgcgcccgctgatgcgccagccgtcggccacgcgcgtggccaccgtggccggcaggccgccgcgtgccggcgatcccagttccggttccacccgcagcgcgttgatcagcgcaccgtcctgcaccgcactggcaaagacctggtcgcgcacggtctgtggccagtgcgaatcggcgcgggcgatcgcgcggtgctgcaggtaggtcatggtcagcaccagcgcggttgcggcatcgccgcccgccaccgcggccacgatgcggcgcgcctgcgccaggcctgccccgccgccgccctgcgcgtgcggcaccacctgcgcaaccaggccattggcgtgcaactgcgcaaagttgtcgtgcggaaagctggcagcggcatcgtgcgcgccggcactggcggcaaagcgcgcgcagagcccggccagcacctcgccaaggcgcgcttcgctgctgggcagcctgcgcagggtagacgttaatgacatggaaaaagactccgggaaggacaacgacgaggcgcgctgccggcgcgcggcccgcaccgaatgccgcctagcgtagcgccggcaccgcattacgaaaacgacgcttattgaatatggaccgtcgtttttattcgttagcgagcgcgcgcgcctgtcgtactttctgcctcagcccaacaccatccgggcggtcacgctgccgccctcaccgaatacaggagaacgcgcatgagcgtcgatttcatcggcatgatccagagccagaagcagtccgagatccatccgccgtcaggcccggtgatcgatcgcgactatgtgcgcgcgtttgcccaggcccacgagcaggccggcttcgaccgcatcctggtgccgcaccattccaccggcccgtcggccacgctgaccatcgcctacgcggccagcgtgaccgagcgcatccacttcatgctggcgcaccgccccggctttaccgcgccgacgctggccgcgcgccagattgccacgctcgaccagttcagcggcggccgcctcggggtgcacttcatctcgggcggctcggacagcgagcagcagcgcgacggcgacttcctcgaccatgaccagcgttatgcgcgcaccgacgagtacctgcacatcctgcgccgcatctggaccgagcccgcgccgttcgaccacgaaggccggttctaccgctttacccagggcttctcggaggtcaagcccgcgcagcagccgcatgtgccgatctatttcggcggcgcctcggaagcggcgctggccgtcgccggcaagcatgccgacgtctacgcgctgtggggcgagtcgctcgagcaggtgcgcgagctgaccggccgcgtgcgtgccgaagccgcgcagcacggccgcacggtgcgcttctcggtgtcgttccgcccggtgctggccgagaccgaagaaaaagcctgggcccgcgccgacagcatcctggcgcacacccgcgccctgcgcgtgcaggccggctacagccgcggcggcccgcaacagagcgaaggcgcacggcgcctgctcgctgcagccgaccaaggcgaccgggtcgaccagcgcctgtggaccgcgatcgcgcgcgagaccggcgggcgctccaactccaccgggctgatcggcacgccggagcaggtggcgcaggccctgctcgcgtactacgaactgggcgtcaccaccttcctgatccgcggcttcgatccgctggaagacgccatcgactatggccgcgagctgatcccgcgcgtgcgcgagctggtggcgcagcacggcgccgcgcagcaggcggagcgcaaggccgcctgatggcctcgccacaccacacaacgaagacggggagtctcgccatgagccaggacaacaacaatcacgccgacccgcgccggcgcagcgtgctgcggctggccggtgccgcggccatcgccgcgccgtcgctgatcctgggccgacaggcctggtcggcgccgcgcaagctgaccttcgcgtggaaccagaacgccttctgcctgacgccgatcgtggtggcgcaggagaagggcttcttcgagaagaacggcctgcaggtcgacctgatcaactacagcggctcgaccgaccagttgctggaatcgatcgccaccggcaaggccgatgccgcggtcggcatgatccaccgctggctcaagccgctggaagccggcttcgacgtcaagatcatcggcagctcgcacggcggctgcgtgcggctggtgggatcgaaagcggcgggggtcaccagcctgcagcagctgaagggaaagacagtcggcgtcagcgacctggcggcaccgggcaaacacttcttcaccatcctgctggccaagaacggtatcgacccggacaaggacatcacctggcgccagtacccggccgacctgctgggcgtggcggtggacaagggcgagatccaggcgatcgccgacggcgaccccaacctctacctgctggaaaagcgcaccaacggcgcctacgtggaactggccaccaacctcaccggcgagtacgcacgcaaggtctgctgcgtggtcggcgcccgcggcgaactggtgcgcaacgaccgccccgcggccacgtcgctggcgcgcgccatcgtgcaggccaccgactatatcaacgagaaccccaacgaggccgccagggtcttcgccaggtactcgcccaagatcaatccggaagacctgcgcaagctctacgccacgctgacctatacccaccacccgaccggcgtcgacctgcgcgacgagatcgccttctacgccgatgatttccgccgcatcggcgtgctgaagaagaccaccgatgccaaacgcctggcgcagcacgtctacgccaatgtgctggggtgatgccatgacgacaagccaacctgcattcgacgccgggcttgcgcgcaagccagccgcggcccccgtgccgcatgccgccgcaagcgcgcgcgcgtccggcccggtctgggccaccggcatcctcgccgcgctggcgtgggccgcgttcggcgcgctgacatggctgtggcccaaccaggcggtgggcttcagcgactgggcctatacgacagagctggggattgcggcgctggcaggcgccgcgttgctggcactagttgcgctggccggccagcgggtccgggccgcgcaacgcgcgctggccacgctgcgcgccgccggcccgtggctggtggcgctgcccgtggccctggccgcgtgggaaatcctgaccgccaagaccgccatcctgcccacgcccttcttcgcgccgccacaggcgctgatcgaggtctatgccgacgactggcggcgcctcggcgacagcgcgctgaacacgctcaggctgctcgggctgggcgtggcctatggcgggctggccggcttcctggtgggcgtgtcgatcggctggtcgcgccgcatcggctactgggtgcatccggtgctgcgcgtgctgggcccgcttccgtcgaccgcgctgctgccgctgaccttctacttcttcccgtcgagctattccgccgcggtgttcctgatcgcgctggccaccgccttcccggtggcggtgctgacctggtcaggcgtggccggcgtcaacaagagctactacgacgtggcgcgcaccatgggcgcctcgggctggttcctggtgctgcgcgtggcgatcccggcggcgctgccgcaggtattcgtcggcctgttcatgggtctgggcgcttcgttctcggtgctggtgacggcggagatgatgggcgtgaagtcgggcctgggctggtacctgacgtgggcgcagggctgggcttcttacgtcaatatgtatgcggcgctgatcgtgatggcgctgctgttctcgggcgtgatcacgctgctgttcgtggcgcgtgaccgggtgctgtcgtggcagaaggggacggtgaaatggtgagtgttgttgagcggttgaaagcatcgagaccctacacgcacgtgaagaagactcccctctcccgcacgcggaagaggggagctaacgcggcggcagacgacaccgcggaagcccagaccggtgcccgcatcgacatccatcaggtcagccactggttcggcagcggcagcgacgggctgcaggtgctggacgacgtcgacctgagcgtcgcaccgggcgaattcgtcgcgctgctggggcccagcggttgcggcaagtccacgctgctgcggctggtggcagggctggaccagccctcctccggcgagatcctgcaggacggcacctcgatcgccgagcctgacccgtcgcgcatcgtggtgttccaggaccccacgctgtacccgtggcggcgcgtttgggacaacgtcgcgctgggcttgcaggcacgcggcgtgctggcaagccagcgcccgcgcgtggatgatgcgttgcggcgcgtagggctggagaccttcgcccgcgccttcccgcaccagctctcgggcggcatggcgcagcgcgtggcgctggcgcgcgcgctggtcaacgatccgcgcctgctggtgctggacgagccgctgggcaagctggattcgctgacgcggctggcaatgcagagcgacctggtcgaactgtggcaacgctcgcgcttctcggcgctgctggtcacgcacgacgtggaggaagcgctgttcctggcgcagcgcgtgatcatcttcagccagcgtccggcacgcatcacggcggagatccgggtcgacctgccctacccgcgccatcgcggcgatccgcggctgaccgggctgcggcacgaagcgctgcgccacctggggctggacgcgagctggtaatggcgttgcgcttcacctcgcgggccgccagatgaacagcccgccgccgcaggcatggctcaatgcactgctggttctgatcgagaaattccagctggccctgttgtcgctatggcatgcccttggcctgaccggcgacagccacggccagccagcctggccgtgggcacggcgcgtggcgggcgaaaccctgctgatcgacctgggcctcgcgcgccaggtcggcctgagcctgtgcgcccttgtctttgccgtgctggccattaccgccgcgctggcctggcgacgccatcgcggcgtgctgctggccgccggtgcgctcgccctggtggcggccccctggcccagcgcagcgctgctgttggtgccggcagcgccgaccagcttccacgccagccctacccgcttctccgtcgatgccatcgcgctcggcgcccgggtctatgcgcagcattgcgccagctgccacggcgcggacgggcgcggagaagggccgctggccgccagcctggcgcagtggccgcccacgctggtcagcccgctgctggcgcgccgcgtcgatggcgagctgttctggcatgtgctggccggcatgcgcgaccgtcacggccagcccaccatgccggccttcggcaatgtgctcggcctccgcgaggcctgggctgtgatcgactacatgaaagcgctgtcggccggcggtggtgccgagggcaactggccggtgccgttgcggctgccggagatggcaatccgctgcgccgatgccgcgccgctggcgctgtcgcaatggcgcggcgaccagcgcgtgcggctggtggcggtggacgggatggcatcgttgccgttcgaggatccccgcttcctgaccgtgctggtcacgcctgacgggcaaccgccggcgcaggtgccgcgcttccgtgccggctgcgccgcggtctcctcgcatgcctggcaggccgtggcggcaatcgccgggcaatcgccttcgcgcctggccggcacccagctgctggccgaccgcggcggctggctgcgcgcccgcggcacgccggggcggcaatggtccgacgcagacctggtctgcgtctcgggaccggacgccggcgcacagcgcgcgccttcgcccgcgactgacgggctgactgcgctgctcctgcgcatggacgccgagccggtgcgcttcgtcaagggcggcttcattcactgaaccgcccccaggccggcacgcagccatccgagtgccgcacgcctgaccctcctcccccttgtttccgccaccgcaggtgagccctcgcccgcggcgcaccttccgtcgccgctctggaacggccaacggacccctataaatgccgtacgaggcactcaaaaccgcaccttgtctcaatttttcatcaatttcattccgtaaatcaaaacttcctattgaccaaccgaagtcttccgcctacatttcctccagcaagcaattttccggaacgtcctgttccactttataagaccctcatcaggagacaacgccatgcgcgacctcgataccacctcgaatcccgccgtttccggtggctcggccgccgcgaaggagagccaggtcccggccggcccgcagaccatgaccccgtcggaagccttcgttgaaacgctggccgccaatggcgtgaccgacatgttcggcatcatgggctcggccttcatggatgcgatggacatcttcgcgccggcgggcatccgcctgatcccggtggtgcacgaacaaggcgccggccacatggccgacggctacgcccgcgtgtcgggccgccacggtgtggtgatcggccagaacggccccggcatctccaactgcgtgacctcgatcgccgctgcctactgggcccacagcccggtggtgatcgtcacgcccgaggccggcaccatgggcattggcctgggcggcttccaggaagccaaccagctgcccatgttccaggagttcaccaagtaccagggccacgtcaccaacccggcccgcatggccgagttcaccgcccgctgcttcgaccgcgccaccgcggaaatgggcccgacccagctgaacatcccgcgtgaccacttctacggcaaggtcaacgtcgagatcccgcagccgcgccgcctcgaccgcggccccggcggcgagcagagcctgaacgaagcggccgagctgctggccaacgccaaattcccggtgatcatctcgggcggcggcgtggtgatggccgatgcgatcgaagagtgcaaggccctggccgagcgcctgggcgcgccggtggtcaacagctacctgcacaacgactcgttcccggccagccacccgctgtggtgcggcccgctgggctaccagggttcgaaggcggcgatgaagctgatctcgcgcgccgacgtggtgatcgcgctgggctcgcgcctggggccgttcggcacgctgccgcagcacggcatggactactggccgaagaacgccaagatcatccagatcgacgccgaccacaagatgctgggcctggtgaagaagatctcggtgggcatctgcggcgacgccaaggccgccgcggtcgcgctgagccagcgcctggccggccgcacgctggcctgcgacgccagccgcgaggcccgcgccaccgaaatcgccaacgaaaaggccgcgtgggagaaggagctggacgactggacccatgagcgcgacccgtacagcctggacatgatcgaagagcagaagcaggagcgcacgcccaccggcggccactacctgcatccgcgccaggtgctgcgcgagctggaaaaggccatgccggaagatgtgatggtgtccaccgacatcggcaacatcaactcggtggccaacagctacctgcgcttcgagaagccgcgcagcttcttcgcggcgatgagctggggcaactgcggttacgccttcccgaccatcatcggcgccaaggtcgcggcaccgcaccgcccggccgtgtcgtacgccggtgacggcgcctggggcatgagcctgatggaaaccatgacctgcgtgcgccacaacatcccggtgaccgcggtggtgttccacaaccgccagtggggcgcggagaagaagaaccaggtggacttctacaaccgccgctttgtggcgggcgagctggacaaccagagctttgccggcatcgccaaggcgatgggtgcggaaggcatcgtggtggatcggctggaagatgtcggcccggccctgaagcgcgccatcgacctgcagatgaatcatggcaagaccacgatcatcgagatcatgtgcacgcgtgaactgggcgacccgttccgccgcgatgcgctggccaagccggtgcgttacctggacaagtacaaggactacgtctgatcgaagtactgcacaccgccagctgacggcgtgctccctctcccgcttgcgggagaggggagaacaccaagggcatagcgcaggtcgctggcccttttttcagttttaccgagccaaccaccatgaaagccatcctccgcatcatcgaccgcgcccgcgccgcgcctcgccgcatcgtgctgtgcgaggccgaagacccgcgcatcctgcaggccgcgcagcgcgcgtcgcaggaaggcatcgcgcgcatcgtgctggtcggcaacacgcgccagatcaacgccgccgcggccatccacggcatcgggctggacggcatgacgctggtcgacccatcgacctcggcgctcacgccctcgttcgcgcagcaactctttgcgctgcgccagaagaagggcatgacgctcgatgaagccaagcgcgccgtgctcgatccgctgtgcttcgccaacctgatggtgcgccttggccacgccgacggttcggtggcgggcgccgaccacaccaccgccgacgtggtgcgcaacgcgatccagctgatcgggctggcacccggcttccggctggtgtcgagcttcttcctgatgatgctgtgcgagcctttccacacgctcaagggcgggctgatcttctccgactgcgggctggtggtggatccggatgccgatgcgcttgccgatatcgccatggccgcggccgacagcgcacgcacgctgctgatggaagagccgcgcgtggccatgctgtcgttctcgaccagtggcagcgccagccatgcggcagtggacaaggtggtggccgccaccgagcgcgtgcgcgcgcaacgcccggacctggccatcgatggcgacgtgcagctcgatgccgccatcgtcgccgagatcgccgcgcgcaaggtcgcgcattcgcaggtgaacggccacgccaacgtgctggtgtttcccagcctggaagccggcaatatcggctacaagctggccgagcgggtcggtggcgccaaggccatcgggccgatgctgcaggggctgaacaagcccgccaacgacctctcgcgcggctgcagcgcggacgatgtgttccatgtcatcgccgtcaccgtggtccaggcgcaagccaccgcggaacaggccagcaagggcgagcaggcggcggcatgaaggcagaactgttgttgccgctgctgggcctgcaggccctgctcggtgccggcacctatttccagacggtgaccggctttggccttggcatgatcgtgatgggcgtcaccagcggactggggctggcgcccgtggccaccgtggccgcggtggtgagcctggtcacgctggccaacagcgcctgcgcgctgccaggcaagctgcagcatatcgactggcgcgccgtcgccgcggcagccatcggcatcctgccgtcggtagtggtcggcgtgctggtgctggagtacctgagttccagcgcagccaccctgctgcaactgctgctgggcgccgtgatcctgtatggcggcctcagcgccgcactcaagcccgcgccgctggcgcaacgctccggcgatggcaccttcttcgtcagcggggtattcggcggactgctgagcggcatgttcggcgtctccggcccgccgctgattttccagttctaccgccagccgatgaagccggttgaaatccgttgcgcgctgatcctggtctttaccgtgacctccaccgtgcgcacgctgttctcggcctggcaggggcagctcgatgccgccgtgtgcgtgcaggccgccattgccgtgccggtggtggtgatcgccacgttgctggggcggcgttttccgccgccgttctcgccggccacgacgcgcagggtggcgttcggggtgttgatcgggatcggggccagcctgatgctgccggcgatttcggcgtgggtgctctaagggcgcgcgcgcccttagaaccgggacgggcctcaggcgattgagcctgcgggctgcgccagcggcgcggtctcttccttctccccgccgccgcccgcctgccccaggtccataccggtagtctcgggcagcagcaccgcggcgaccactaccatcgcgtagccgactcccgccacgatggcgatcgcgatcggcagcgaggtgtgccccgtactcagccaccccaccgacagcgggaacagcgaaccgatcacccggccggcgttatacgaaacgccataccccgttgcccggatatcgttgggataagactcggagatggtcgcgccgatgcccgcgaacacgccctgcatcaggatgccgagcgggaagccaaggaacagcatcgacgtattcgacaccgggatcaccatatagaccagcgcggccacgaacgccccgaccgcaaaggcgatgtaggtcagccgccggccccagcggtcggtggcgtaggcgcccgccacgtagccgatcagtgagccgataatggtgaccgccaggtaagaactggtgccgaacaccgacaggccgcgctcggtcttgaggaaggtcggcaaccacgtggcgatggcgtagtacgcgcccagcatcccgcccgacagcaggctgcacaacaaggtcttggacagcagcggcccacggaacagccggcccaggcctgccagcgccgccccctgccggccggccgcccggctcttcaggaagatttccggctcttccaggttgcggcgcaggtagaccaccaccagcgccggcaggatgccgaggaagaagcagacccgccacgccgtctccgccggcagcacgctgaatgcgatcgcgtacacgatggccgccgcgccccagccgaaggaatagctgctggcggtaaagcccgagtatttgccgcgatggaccggattgcggatcatctccgtcaccagcaccatgcacagcgacgactccccgccaaaccccaggccctggatcatgcggaacagcatcagctgctccggcgactgcgccagcccgcacaggaagcaggcccccgcgaacaccacgatggtccagcgcagcacccgcacgcgcccgtagcggtcggccaggatgccggccccgatcgcaccaaccagcgacgacaccagcgtccaggtgacgatggcgcccgctgtcgacttgctcatgccccactgccccagcagcgtggagataaggaacgaatagatcatgaagtcgaagacatcgaccgcatgcccaaggaacgcgccatagaagcccttgcgctccatgcacgacaaatcacggaaccagtcgaacatgatccctccctgtggtgtgtgtggtgttgtggcttagttgttgtgatccgccggcaggacagacggccgcggcgggggccggaacgcgtagcccgcgccttccagcaggctggcaaagcgcagcgcggtgagatcccggtagcggccggcgacgatctgcacgccgaccggcaggctactggtgcccggcccgatcggcgccaccgctgaaggcagcccgcacagcccggaatggccggcccagaacaattgcgtggtcatcggctgcgcgcggccgttgacggtgaggctgcgctgccagggctggccggcctcgtccagcgcgaaggccgtggtggctgcggccgggcacagcagcacgtcataggtggagaagaagcgccgccacgcggtggcaaagcgttcgcgggccacctgcaggcgcagccagtcgcgatgcctcagggtcgcgccggtgtactggagggtggcgtaggcatggtcgtccgcggcggctgtggcggtgcggttcaacgcgtcggcataggccgcatcgtccatgtgcaccgcggtggttgcgcgcagcagcgtcacgtagacgtgccacagttcggccgcatcgaaatccggccgcacatgccagtccacgcgcgcgccctgcccggccagccagtagcccagtttttcgatctgcgcggcaacctcgccgtcggattcagcctgcgcatgggtgggcaacaccgcgacgcggaagtcggccagccgtcggtgcggacactctggcagatcaaggcggtagggcagcgcctcgtcgccgtgcgggccggcaatggcgcgcaacaccggttccaggtcgcgcgcgctgcgggccaaggggccggcgacattgatgtcctgttcgccgaagcgcgccggacccaccccgtggcctgccagcggcaccaggccatggctgggcttgagcgagaagatgccgcagtagtgggccggattgcgcagcgaggagccgatatcggagcccacatcgaaatatgacaggccggcgcacaccgccgccgcgctgccgccggacgagccgcccggcgtgcgcgacggatcgtgcggattgcgggtggtgccgtagatggcgttgtagctttgccagtcacgcaggccgagcggaacgttggtcttgccgagcaggacggcgccggcatcgcgcaggcgctgcactaccgcggcgtcgtgctgggccgcacggccctgcatggccggattgccgcaagtggtcggccagccggcgacgtcgaacgactccttgaccgagaacggcacgccgtcgagtaccccgcgcgcttgccctgcccggcgccttcggtcgctttccagcgccgcggcgcgggcggcatcgaaatctgacagcaccagcgcattgatgatgccgtgccagtcgtgccacgcggcttcgcagccatccaccagttctaccgcggagacttcgccggcggcgagccgctgtgccacctcccacaacggcggaaaaccgccgggagcccggtcggacaggttcacatcgactccttgtcattatccgagccggcagcggcgcggtgggggcgtataggacaagcttcgggaagtgctgcgaatgcgttggtatactatattccgtattgaacggagcgcaagcgaaagtgtcacgcgcgagcgcgctgaagcacgccagcagtggaaagcgtagaaggtgaatggtcggcaggcagaacgcctgccaggaggcagcggcggcgtgctgacgccgccggctctcagtcaggctggatcagcaatggccacggcgtggggcgcggccgcccagcgccaggaagaagcggccgatatcgcgcaggcgcagcggcagcagcggcgtggcatggcggacggcattgcgcgcggcaaagtggtgcaacagttgctggccgacgggttgcgaaagatagcgttgctcaggcgactgcatggtaaatccctattgatctggaatgcctacagtatacctaaattggtgcaatgcgccatggcggcgcatgcaatgcccagttgccgggcatgcaacgaaatgctggaaacgggagaggaaaaaccggggcccaacgccctcaggccgcctctgccctgccctgcccgtccaccggcaagtctgccgccttggcggcactgtagacatggcgcgcggccagcaaggcggcaaggtcggcatccccggcgatgactgcctgcaggatctgggcgtgttcatcccagttctgacgggcgcgaaccacgttggccgggccgaacagcaccgcggtgcgctcgcgcagcgaacgcatcatttcctgcagcacgctgttggcggctatggtgccgagcacctcatggaagcgggtattgagggcgagcaactcatccgcgcggccctgggcggcggcatccatgccctggcgcagcacgctctccagctcagcaaccagcgccgggtcgcggcgctgcgcggcgagcttggcgttgagcccttccagcgtcgcgcgcacctccaccatctcgcgcgcgatcactggcgacaggctggcaacggttgcgccgcggcgcggctcgatcaccaccaggccctcgctggccagcgcgcgcagcgcctcgcgcaccgggatgcgcgacacgcccagttcggccgacagcttgttttccaccagccgttcacctggcgcgtacttcccgttcaggatgccttcacgcagcttgtcggtgacaagggcgaacagcggcgagtggctggcaccgaggctcagcggctcggcgggcgcggcaggagatggagtgagagacatgggtcagcaaaggcgtaagcggaaaggctggcatcattgtataccagccgttccctgtataccgccatgtcttaacaatgctggaaggtgaagctgtccgcataaatgtgatccgtactggcgccgctcgccaggaaagcggtgcgcgcgtctcggatcatattgggagaaccgcacaaatagatggcgtgctcgctcaggtcacccaggtcagccagcgccgcatcgtgcacgtaaccgcgccgtccttgccatcctgcgccggcacgggacagcaccggtacgtactggaagtcatacagccgctcgccccaggcggggatatcggagtgcaggtacaggtcttccggcttccgcatgccccagtagagcgacaccggtgggcagtcgggatcgtccatcagcgattcgaggatggccttgatcggcgccagcccggtgccggtggccaccatcagcagtggccggtaatccatggcgcggtagaagaagctaccgagcggcagttcgacgtcaacggcgtcgcccgctttcatctgcggcaggatgccgtcggtgaaggcgccgcccgggatgcgccgcacatgcaggtcgacccgtccgtcgcgcggcaccgatgccatcgagaagctgcgcgcgcgcccatcctcgctcaatagcttcaggtactggccgggacgatagtcgagcgcaccagcgtccggcacttccagttcgatatgcaaaacgtcagccgacaacgcgcgcacggcctgcaccagcgcccgataacgcgccggctcggcgcaggcctcgtcctcgcgcgccgtgctgatgaccaggtcgcccagcggctgcgcctggcaggccagcgcgtagccggcggcggcctcgtccggggccagaccgaacggttcctcgtcataccgcacctgcccggccagcagccggatacggcaggtgccgcagccgcccagctggcagtcgcgcggcaaggcgatactggcgcgcccggcggcctgcagcagggtctcgccgcgttcgacaaaaaagacctgctgcgtttcggcgatctggatgcggtacgacatggcgcctcctacttcttgatatcggcctgcaccaacaccttgaggtcctgcggcgccagcagctcggccagcgccagcagcgcggccagcccggcctgcgtgtcctgctcgccattgccgccggacaggccgatgccgccgatcacctcgtcgttgacgacaatcgggaagccgcccacgaacgcggcgaacttgccctcgaagctccactggatgccgaatgcctcgttgcctggcagtgccggcccgttgggcggcgtggtgaacaggtgcgtggagcgcttgtggcccgcggccgtgaaggccttgttccatgcgatctgcggcccggtgatgcgggcgccgtccatgcgctcgagcgcgagcggatagccgccctcgtcgaccacgcagatcgactccagcacgccgatttcctccgagcgccggatcgcggctgcaaccatatggcgcgcctcgcgcagttccagcttgatggcttttttcatgtctctatgactccttgtgacggccgggctcaggcgccgcggtagaccgtcttgacctgcgtatagaactccaggccggtgcggcccgactcgcggaaggtcgaggtgctcgaccgctttaccccgccaaagggcgcgttgaccaggttgccggtggtggtgcggttgaccttgaccgtgcccgcctcgatgtccgtggcgaagtggtggatgtagcgcgggttgctggtgacgatggccgccgccaggccgtactcggtgtcgttcgccttggcgatggcgtcggcgtagtcggtgaagcccaggatggcgatcaccggcccgaagacctcctcgcgcgcgatccgcatctgctgggtcacgtcggtaaacacggtcggcgccacgtagtagcccttgtcgaagtcgccgccggcaaggcgcgcgccgccgcacagcaacgtcgcctcggacttgccgatatcgatgtaacgcagcaccgtttccagctgcttgtgcgacgccagcggcccgaggtccatcccggccgtcatgccgctgccgaccttgagggtggcgaccttcgccagcaaccgctctgtgtatgccgccttgacggactcggccaccagcacgcggctggtcccggtgcacgcctgccccgacagcgagaagccgcccttgatggtcaggtcgacggcgcggtcgaggtcggcgtcttccatcacgatcagcgggttcttgccgcccagctccatctgcgtgcgcgtggtcagcggcacggcgcggtggatctgctcgccggcgcgcgacgagccggtgaacgagatcgcccgcacggccggcgcctcggtgatggcagcgccgatttccgccgcgctgccggtgatgaaattcagcacgcccttgggcaggccggccttgaccagcgcctcggccagccggtagcccgacagcggcgcctcggacgacggcttgaacactactgtgttgccggtcaccagcgccggggcgatcttgcgggccgggatcgataccgggaagttccacggcgcgatcacggtcaccacgcccagcggctcgcgctggctgtagacgagttggtcggggtcgtcgttcgggaacacctcgccggtgaaggtctgcccttccactgcatagaagcgcagcgtctgggccgagcgcagcacctcgtcgcgggccagcgccagcgccttgccttcctcgcgggtcagctcggcggcgatgctatcggcgttggcctcgagatggtcagcggcacggttgaggatggcggcgcgcttgccgaccggggtctttttccagccggcgaacgctgccgcggcggcggcgacggccgcctgcgcgtccaccgcggcagacgcctggaagcggcccacaatatcggcggtatcagccgggttgacgttatcgaaggtgcggcccgactggcaggccgtccattcgccgtcgatatggttgaggaatacagtcatcgtcgatccggttgcgctgcggcgctcaggccgccatgtcgagttcgggcagcggcagctctttctcgacgtagtcgtgatagagcgccgtcgtgtacagcagccgcatctgcgcgccgatctcgcagatcttcaggcagcgctgctgcagctccggcgtgttggcgtgctccagcacgatctggtagccgcgctcgccgtggatctcgtccgagacgatatgcaggtcgaagaattcgacttcctcgtcagtgaactggtacttgtcgcgcagcgtcggggtctgcttgcggtagatcgacggcacctgcgactccagcccgaccaccagcccggctaccgcgacgatggggtcttcacgcatggccacggcgtagcaccagctctgcaggccacgggtggtgggcgacatattgtccgggtcgatcacgcgctcgcgggtggtgccgcaggcttcggcgaagcggatcagcaggtcggtatggcggtcgccgccgatctcttcctcatacatattggcgagcaggaaatccttggcttcggtatagcggtccggggtgcgggcgtagatgtagcccaggtaatccgcgaacgggcctacgtagtgatagtggttctcggcccagcgtgcgagatgggcgcgggtcagcttgccgctggcccaggccacgctgaacggcgccttgttggcgctcttgcctttgatggcttcttcgagggcggcacggaatgcttcgcggttcatcagttcggccatggcggaggctcctggttggcgaggtggggcgattaagtgggttggatgccggggtcgcttcgcaaatcgatcagcccttgcatggttgtatactatatacagccatgcagcgacgacaagggcttcgttgactaatcatgtaagtgtttacccgtcggtgtcgcgggcaatggcgctcaggccgcgcgacgctccgccgcgccggcgatgcgggaccaggcgaagcccgccagcgccacgtcctccagccctacgccgactgacttgtagatcacgatgtcgtcgtcccgctggcgcggcgacaccttgccaaggaccacctcgcccagctcgacaatcttctcgcgcggaagagcctgcgaatcggccagcacgatgtcgcccgcctcgcgcacggactgcgggcgccactcgaccaccacggcggcggcgcggcgcagcgcggtgtcgtccagttcacgcgtatgcggcaggctggagccgatggcggcaacgaaagcgccaggccggagcgacgcgcccgcgaacagcggcgtggtcgcgcgcgacgccgtgacgacgatatcggcctcggccacggcagcatcgggctccgccagcgtgaccgggatgccgcacagcgccgacagccgcaccgccatgccggcatcggcgtgcggatcggacaccaggatgcgcgccagcccgagcgtctcgctgagctggcgcgcgtgctgcacgccctgcgtgccggcgccgaacagcgccagcgtgcgcgagccggaccgggccagccgctgcgccgcgagcgtggtgcaggcagccgtgcgcaggcgcgtgatggcgccagcgtcgaacgaagcgagcggacggccgtcgtcggtcgagaagatcaggatgacaaaggagaactggccgttgatggtggtgtagaccttggcgcccgccacgccctgctgcgggatcaccgcacccagcgtggacagcttgacgccgcccgcctcggtgcgaatgcgctcctgcatcgcggcgtcgccgcgaccgaagctggaaaaagcggcttccatgacttgccgggcatcgtccgggctgacgtgggcatcgatcatcgcgtctgtaatgtgctgcatgggaactccgctggttgggatggagacaggaaagacagtgatctctgcgggccagagcgtcacgaaaaggcagtgcggccgagcacaccgagcgccccggcagcgcaaagacccagcagcagccggcgcaccgccccgggcgagacgtgcccgcgcaaccggttcgagagcgcgaaacccgcaaacaggaatggcgcaagggccgccgccagcaccagctgcggcaaaccgaagcgccccgccagcgccagcatggagagcgacagcaccgcgccgccggccaggatgcaacccatcgtcgcgcgcatcggcgccggcgccatgtgctgcatgaccagcgcgaacggcggcgcaccggccgaggtgatcgttcccatgaagcccgacacggtgccggcgatgaccacattgggcgaggtcggcagcaggcgccagcccagcaggctcagcgccacggcggcgagtatcgacactgagaacagcacccccagcggccccggcgccagccacgccatggtcagcaccgctgccgccccgccaagcgcgcgcccgatcagggcgaagcctgcgatgcgccacgcgatcgcctcccgctcacgcagcgcgcccatcaaagagagacagcagcccatcgccagcagcggtcccggcacgaggtccgggaagaagattgcgcccagcggcgccgaaagcatcgcgaagccgatcccgcccacgccttgcaggcaagcgcccaccaggatgagcgcacccatccatagataagtggagacggagaggcctgtggggagcagggagtacaacgtggcgggcaaggcagaggtcatggcagcaagtcgggacagcagcttggagggcatacgaagcgggttggagggacggccttatgcgggcatgcctcctgctcatatcgcacttcgcgaggaagctgcgcttaacggtatacagtctacatgtcgcggcggcgaccttgcaaatcactcacctgtccgcgcaccacttggaggacgccacataccgccgcaggcccaataaatgtgcgacgttcgggcaacttgcaccagtctgggctaggcgtaattccggatgaaaaacctgttgtcgcgagattgcatcggaatatagtataccaacaccggattccgaagctgagagggaatccgggccccacaacccctccgccccaagggagtcttcatgtcacaacaagtcgtgatcggtgccgcgcactggatctatctgtcaggggtagcagtcatcgtgctgacgatgatcctgcgcgccaatgttgtcgtgccgtcgatcgttggcaccgccctggtcgtgtttgcgcttaccggcagcccggtttcggcgctgggcggggtgttttccgcgagcctggttgccgccaaggagctgttcaatatcttccttgtgatcgcgttcatgacggcgctgctcaatgcgctcaaaacgctgcgctccgacatccgcatggtcgagcccttccgcgtggtgatgaagaacgggcattcggcgttctttatcctggcgggcatcacttacgtcatctcgctgttcttctggccaaccccggccgtgccgctggtctccgcgatcctgctgccggccgctatcgcggcggggctgccgccgctggcgggcgcgatggccatcgccatcgccggccagggcatggcgctgtcatcggactatgtgatcggcgtcgcgcccggcatcagcgccaaggcggccggcgcggcggtgagcgccgcggtggtggccgatcgcgcgctggcgctgtcgatcatcaccggcacgattgcgctgtgcctggcctatctgtcgatgcgcaagcatatcgtccccgcctgcggcaccctgctcgaccgctggcaggcgcgcgccagcggcagcgccgaggcgctggaaggcggcggtaccttcgacaaggccgagatcgccaggggcaccgcccacgccgagccgctggccagcgacagcaatatcgaggcaagcctggcgatggtggcccggcgccgggtgaagtggtcgaaatgcttcgcgatcgtaacgccgattgctttcctcgcagtggtcgccgtcatggtgctgcccaagctgggtaccggcgtgcaggacctcaagggcggcgatgcggctgcgctggtcggcggcgtcgcggcggtgctgatgatgctggcgacgctggccgcggaaggcccgcgccgcatgctcgacgtgtgcccggagcacatcaccgacggctttgtctttgccttcaaggcgatgggctcggtgttgccgatcgcgggctttttcttcgtcggcgccggcgaaaccgccgcgcagatcctgggcctgccgccgggcaaggcgccgagcctgctgttcgagctgatccaggcctaccagcacatgatcccggacaaccacgtgctggtcgccttcggggtgctgctggtcggcatgatcaccggcatcgacggctccggtttcgcagggctgccgctgaccggcacgctggccggcgcgctcggcccggtggtcggcttcgaccccgcgacgctggccgcggtgggccagatgggcgcggtctggaccggcggcggcacgctggtggcgtggtcgtcgctgatcgcggtggccggcttcgcccgcgtgccggtgctggacgcggtgcgcgcgctgctgatcccggtgctgatcgggctggcatgctccaccgtcgccgcgatggtgttgtggtcgtaggcggccgcaagcaacagccaggcccctccgattttttcgacaattcatgaggccgggcggccagcccggcaggaaccgcgccatgccgacagtcactttccacaagcagggccagaccttcgtcgacgaggtcaaaccccagaccaacctggtcgtccgcgccgggatccgccagttcccctaccccaacctgcgctacgagtgcggcatgggcaagtgctccaaatgcgcctgccgcgtgatcgccggcgccgaacacctgccgccgcccaactggaaagagaaaaagcaactcggcgagcggctcgaacagggctaccggctggcctgccagctctggatcgagcatgacatcgaactggcccaggacgacctgcccgcccaggcgcctgccatcgtggccacggccggcgcggatgtctgacatgttcgtccttctcaccagccgccccggtcagttccgcaccgagcccaccgcgggcatgaccgcggtcgaggcatacgactacgtcttctatggcaagcgcacggcgcgctttgtcatcgcggaactggccgccgacaccaaggtgcgggtgatggaagaaacgccgcccggcatcgtcaacctggtgtcgaccaagttcctcgacaagtacgccacgctggaagccgcccgcgtcgcgctgcgcgagctggccagcttcggcagcatggacatcgccctggtgcccgccccggtcgccatggcaggcgctcctgactactaacgcctgaccttcagtcaatcttcgccatgatccagatcaccttcctcaccaaccacggcaagacggtcagcgcgcccgtcaacagcaatctgctgcgcgtgtcgctgcgcgagcagggcggcatccctttcaagtgcgggggcggcctgtgcggcacctgcaaatgccgcatcgaaaagggccacgagcatacagacgcggtcaagccgaaggaaaagaaactgctgaccgaggaggagctggcgacggggttccggctggcctgccagacttttatcgatggggatatcgcggtgtcatggcagcccagggagacgatgcgcgggtgagcgggcgctgaggagcggctgaaagaataccgcgcggggcaggcgggtgcgccttcgcgcagcgtttccgaacgctagtcttgccgctaccgccgcctcgcccccaccagacccgccacctcatccagcatcgccatgtccaccggctgcgacaggtccagcgccagcgtgtgccggtagtaggggctcaagtccagccctacccccagccccagcacttccacatcccgcagcgcctcatgccgcgccaccacggccttcaggtggttgtcgaggtagcaggcgtcgttggcctgcccggtcgcggtatccatgggactgccgtcggacaccaccaccaggatgcggcgcgccttgccgctggcgtgcagccgcgcgcaggcccactccaccgcctcgccgtccacgccttcgcggaacaggtcggccttgagcagtgcggcgatgtcggtgcgcgcgcgccgccagcttcgctgcgcgtccttgaacaccatatggcaggtctcgttgagccggccagggtgctgcgggcggccgcgcgcgagccagtcggcgcgggcgcggccgccgttccaggcgttggtggtgaagccgagcacctcggtggccacgccggcctggtcgagtgcgcgcgtgagcatgtcgatcagcagcgtgagcggctcggcctgcgccttcatcgagccggagcagtcgatcaggaagccgaccacgcagtcggcatgagccttgtgcgcttccaggcggaagagccggcgctcggagggggagcagaccagctgcgccaggcggcggccgtcgatacggccgctttcctcgccgaaggaccagccgtccacgcgcggctgcgacagcgcggcgcgcagccggcgcgccagccgggcgatgttcacgcccgcgcgcgcgatgcgtgcgtcaagccgcgtgcggtactcgtccagcaaggcgcggcgcaccagcgtggcggcgcgcacttcgcggtcgtagcgggtggtgaagacgcggtagccgtcggtggcgtcggccagcacgcggctgtggccgctgtcggccagtgcaaagtcttccgcaggcggttcgtcgaaatccagccacagcgcaaacccggcgcgcgcagccgaggctgcgttgtcgtcgtcttcgccggcaagcggggcttcggtacggatcatctgcgccaccgcgcgcgccagcgccagtgcgtacgcggcgtaggcggcctggtcgtggcgttgcgcgcgcaggccggccagcgcggtgccgagcaccggcacgatggcggcgcgcgtggcttcgatcaggtcttcggtctcttccagcaccggctcacccgtcaggcgcgaccacgacacctgcgccacggtatagagcaggatgccgagatgcccctcggtcagcccggagcgatggaaggcccgcgaccacgccatgaagcggtggcgcaggttggccgccacgccggccatgccgcgcggcaggcgggtctcgcaacgcagctgctcaagcagttcgaagaccaggcgctcgaccgcatctgccgggcacagctgccgatgcagcgcggcgtcggaatgcgcctggcgcagggcggcaccatcggccgcgccgcgcaggcaggtggccgtgtcagtttccaggtccgtgcgcaagtgcggcgcatgctgcggcaccgggcgcatcgcgcgccagagctggccgtcgcggaaatgcagcgccgcatcgccagtgatcgcgcgcaccgcggcaccggacagctcatcctgccgctggcgccggcgcaactgctgcgcgaccgtggccgcactcatcgcgcgggctccgactcggagctgacgccggcggcttcgcccggcaggtggccaaagcaacgctggtagtactcggccaccaccggccgctcggcttcgtcgcacttgttcaggaaggtcagccggaaggcgagcgcggggtcgcggaagatctggcagttctcggcccagctgatcaccgtgcgcggcgacatcagcgccgacacatcgccggcggcaaacccgcggcgcgtgagcccggccagcgccaccatcgcatcggccagcgcgcgcccggcgtcgtggtccagctccggcacgcgcgccagcacgatgccggcctcctcttcatgcggcaggtagtccagcgtggcgaccacgttccagcggtcgatctgcgcgtggttgagcagctgggtgccgtggtagaggccgttgacgttgcccaggccgacggtattggaggtcgcaaacaaacggaaagacggatgcgggcggatcacgcggttctggtccagcagcgtgaacttgccgtcgcgctccaggatgcgctggatcacgaacatcacatcaggccggcctgcgtcgtattcgtcgaagatcagcgccaccgggcgctgcagcgcccacggcacgatgccttcctggaattcggtgacctggcgcccgtcgcggataacgatggcgtccttgccgaccaggtccagccggctgatatgcccgtccaggttgacgcgcacgcaaggccagttcagccgcgcggcgacttgctcgatatgggtcgacttgccgctgccgtgcaggccctgcaccatcacgcgccggtcgcgcatgaagccggacaggattgccagcgtcacctcgggctggaagcggtaggccggatcgatctccggcacgtggtcgtcgcgctggctgaaggccggcaccatcaggccggaatcgatgccgaacgcgctgcgcaccggaatcatccggtccggcttgccaaactggtcttgcgtcacctcatgctccttgttgcttgctgccatgccatcggcactgcggcaagcggagcaatccgcgtgacgccgtgcgcgctattcgtcctcttccgcgccgccctgccagctgccggcgctgtcggcctcgatcgccgccagcgcgcccgccgcacgctgcagcgcgggcagcaattgcagcaccttgtcgcgcgtcacgcgcatcaccggggcctgcagcgccagcccaaggttggacttgccgccgtccacggccggcaccagcacgccgatgcagaccagccccggcaggaactcttcatcgtccatcgcgtagccgtcgcgcttcacgcgctccagttcggcttccagctgcgcgtggtcggtcagcgtgttctgcgtgtagcgttccagctcaacgttggccagcagccgctggcgctgcgccggcgccagctgcgccaggaacagcttgcccgtggctgagcagtgcgcgggcacgcgcgagcccggatgcaggtagaagcgcagcggcgccgccgtttccacgcggtccaggtacagcacctcgccgccggagaacgcggtcaggttgcagctctcgcccacctcttccaccagccggcgcagcaccatgtggcgcgcaccgtgcgaggtgctgttgagcaacaggttctccgccagccggcgcagccgcaggccggtgccgtattgccgcccgtcgccgttgcgctggatcaggcccgccgcctccagctgctgcagcatgcggtgcagcgtgggcttgggcagtccggtttcttccaccagcgcctgcaggttgaaggactggtccttctccgcgatgacttcgagcaggccgaacaaacgcagtgccggcgtgtctccatccggcttggcgtcacttttggcgaggcgcatatcgttcatgcctggctccatcataggtaagtttcattttcagagtcaaatcatatcaattatcgaaacttctggttgaccttcccctgcgaacggcctacattccagtgaaagaacaatttttcggaacttctggttccagtttttaagcgatcaccggagacaagtcgacatgtacggataggccatccctccccgggattgcaaatactgaacgaccacggccccaggctggcaattactgccctgccatctataccgaagagaagccgtggcgcctgccttaaacgctgtactggctgcaacgcagtaccgacagctagcgcagcacaggagacacaacatgatccaacaaccagagtccggcaacgggctatcccacggcctgaagcaacgccacatgaccatgatcgcgctgggtggcgtgatcggcgcaggcctctttgtcggcagcggcgtcgtcatcaagtccgccggcccggccgcggtcctttccttcctgatcaccggcctgctggtggtgctggtgatgcgcatgctgggcgagatggcctgcgccatgcccggcaccggcggtttctatgagtatgcgcgcgaagcctggcgcgaccgcccggcggtgggcaacctggccggcttcctgaccggctggatgtactggtacttctgggtcatcgtggtggcgctggaagccgtggccggtgccgacctggtgcgctactggctgcccgacgtgcccaactggatcatcagcctggtgctgctggtgatgctgacgctgaccaacctggtgtcggtcaagtccttcggcgagttcgagttctggttcgcgtcgatcaaggtggccgcgatcatcgtgttcctgttcgtcgccggcgtctatgtgctgggcctggcgcccggtgcccatggcatgcaggtggccaacctgaccgccaacggcggcttcatgccgcacggcatcgtaccggtgctgaccggagcggtagccgccacgggcttctacttcggggccgagatcgtcaccatcgccgccgccgagaccgccgagccgcagaaggcagtggccaaggccaccagctcggtgatcacgcgcgtgctggttttctatgtgggttcgatcctgctggtggtctgcctggtaccgtggaactccaacagcatcgccacgccgtacgtcagcgcgctgaacgtgatgggcgtgccggcggccgcgcagatcatgaacgcgatcgtgctgaccgcggtgctgtcggcgcttaactcgggcctctatgcctcgtcgcgcatgctgttcgcgctgacccgccgtggcgacgcccccaagtcgctggcccgcgtgagccgcaacggcgtgccggtgcgcgccatcctggtggcgaccctgttcggctacggtgcggtggtgatgtcctatgtctcgcctgatacggtgtttgccttcctggtgaactcgtacggcacggtggcgatcttcgtctacatcctgatcgcgatctcgcagctgcgcctgcgttcccgcctggagcgcgaagcgccgggccagctgcgcgtgcgcatgtggtgctacccgtacctcacctacctggcgatcgtcggcatgatcggcatcgtggtggcgatggccttcatccccgaccagcgcacgccgcttgcgctgggtgtggtgagcctgggcatcctgctggtggcctacgccgcgcggcacctgtttcgcggtagcgtggatccggtagtgccgctggcggagatgccgcgcccggacctgcatgagtattgatgactgaccatgactgacgtggcgcgccggtgcggtatgctggcgcgcttcgccgtctaggcaacgcccctgccccatgagcctgaagtctcccaccaccctctggtcccagctgttccagcagcatgcccactcgggcctgagcctgcagggcaagatccgccagatgctggtctcggccatccttgacgagcagctgccgcagggcgagccgctgcccagcagccgcgagctgtcggcgcaactgcgcgtggcgcgcaacacggtggtactggcctaccagcagctggtcgatgaaggctacctggtggcgcgcgagcgcagcggctacttcgtcaacccggagatcctgggcacgcgcgtgagcggcgtggcctcgctgcgcggcgaggcggtgcccgcccgctcaggcgagccggactgggagcggcgctttgtgttccgccccacgcagcagcgcaatatcgtcaagcgcgccaactggcgcgactacccctatcccttcatctacggccagtacgacccggtgctgttccccacggcggactggcgagaatgctgcctgaaggcgctcagcgtgctcgacatccacgactgggcccaggacatgatcctgcgcgacgacgaatcgctggtgcagcagatccgcacccgcgtgctgccgcgccgcggcgtgtgggccggcgccgacgagatcgtggtgaccgtgggcgcgcagcaggcgctgtacctgctggccgacctgctggtcagccccgacacgccggtggggatcgaggaccccggctatccggacgcacgcaatatctttggctcgcacacctcccacctggtgccgctgccggtcgacggcgacggcctgaccctgtctgacgcgcaacgcgcctgcgactacgtctacgtgaccccgggccaccagtgccccaccaccgtcaccatgccgctggcgcgccgccaggccctgctgcgccaggccgaggaagctgacttcgtgctgatcgaggacgactacgaaagcgaaagccgcttcgaaggcgaccccacccccacgctcaagagcctggaccgcagcaaccgcgtgatctatgtcggcagcctgtccaagagcctggcgccggggctgcgcatcggctatatcgtcgggccggcggcactgatcgccgagctgcgcggcgcgcggcggctgatgcttcggcatccgtcggcgtatatccagcgcgcgttctcgctgttcctgtcgctgggccactatgacgcgcacctgcgccggctggcggccgcgcaccgcgagcgcgccgaagccgtgctggcggcactggccacgcatatgcctgacttccgcgcggtgccgatcgccggcggcgcctcatgctggatcgaggggccgtcctggctcgatgccgatgcgctggcgcggctggccgagttgcagggcgtgctgatagagcccggcagcgtcttcttcatggccgagcccgcgccgcgcaatggcttccggctcggatactcgtcgatctcgctggaccgcatcgagcccggcatccgcgtgctggcgggcgtggcgcgtgagctgcaggccaccgccagcggcgccacaaccatcgccgccgtcacttcccgggtccgtcccgcggcctgagccggcccgcggcggtgtctgccgccgctggcccaagcgattgtcccgaactggcgctacagcgccgcgcgcggcttccctatcctcgagtcatggccggttccccacggaccggcagacaacactcaggagaccaacccatgtccaaggacaacaccgccgccggcatcgaactgctgcaggccttcaacgacgcctggaaccgccacgacatcgaggccctgatgggcttcatggccgatgactgcgccttccacggcgtggccgggcccgagctgctgggccgcagctttatcggccgcgacgcggtgcgcgaaggcttccagctggcctggcagactttccccgacgcgcagtgggtcgatggcgaccactttgtcgtgggcgaccgcggcgtgagcgaatccaccttccgcggcacccgtgccgacggcgcccgcatcgaggcgcgcatggtggacgtcttcaccttccgcgacggcaagatcgcggtcaagaacgcgtaccgcaaggatcgcccgcccgtcgtagcgcccgcagcctgaccgaggagacgcgccatgcaagccgtagccccccgcagcagcctccttgccggcgagcagtccaccgcgcccacccggccgtacgaccccgcctacgatcccctgcacacacccacccccggtcacggccgcgaatacgcgcccacctactggatcggcaccgcgggcgaaccgcccgccgacgacggcccgatcacgcatgacatcgacgtggatgtggcgatcatcggctcgggcttcaccggcctgacctgcgccatcttcctggcacaggaatacggcatcaaggccaccgtgctcgaagccaaccgcgtcagctggggttgcagcacgcgcaacggcggccaggcgcaatgcgcgtccgggcggctcaagcgctcgcagtggatccagcgctacggcctggacaccgcgctgcgcctgcatgaagaaatctgcgacggcatggagaccttcaagggcctgatccaggacatcaactgcgatccgcagcctggcggccacctgtatatcgcgcaccgcgccaaggtgatgccggcgctggagaaggaagccaagctcctgcgcgaagtcttcaagtacgacgcacggatcatggacgccgacaccgtgcggcgcgactatgtcgacgacaaggaagccgcgggcgccatgcatgagcccgaaggcatcggcatccacgccggcaagctcgccttcggctacctgcgccgcgcgcgcgagctgggcgccaaggtgcatccgtccagcccggtgaccggctgggaaacgcgcaacggcgtgcactacctgcgcacccccggcggcatcgtgcgcgcccgcgccgtgggcgtggccaccggcggctatacctcgcagacgctgcaccgcgagctcaagaaccggctgttcccgatcctgtcgaactccatcgtcacgcgcccgctcacggccagcgaactggccgcgtgcaacttccgcaccacgcaggtcatcaccgacacccgcatcctgcgccactactaccgcctgatgccagatggccgcctgcagatcggcagccgcagcgccatcaccggcaacgatgcgccgcaggagcagtacaagcagaagctgatcgacgacatgcaccgcaagttccccgcgctgcaggggatccaggtcgattactcgtggtggggctgggtcgatgtcagccacgacatgatgccgcgcatcacccagccggatccggcccagtcgatctactacgccatgggctacggcggcaacggcgtgatgtactccgcgcaggccggcaagcgcctggcggcgctgatcgccggcaaggccgccgcgctgccggaactgccaatcttccgctcgccgctgccgttcccgaacgtgcgcgagatggtggaatcgcagatgtttgcgccgttccgaaggatggggcagcgggtgctgtaccactggtatcacctgaaggacgacgtgctgtaactggcgcgtgggcgtgccgcccctggcgcgcccacgcttcaggcctcgctcagaacagcgtgtagcccccgtcgatcacaaaggtatcgcccgtgtggtaggccgacgccggactcatcagatagaccgcaatcccggcgaagtcgctgccctcgccccagcggcgcatcggcacgcgcttgtgcaccatctcctggaaggcatcgttgccctgggccacgctggtcatctcggtcttgatccagcccggcaggatcgagtgcgcgcggatgcccttgcgcgcgtactccaccgccagcccccgcatcatcgagatcacgccgcccttggtggcggcatagtgctcggagcgcggcgcgccttctatggccgcgaccgaggccgtgctgcacagcacgccaccctcgccctgcaccagcatctgccgcaccgcggcgcgcagcgtgaagaaggcaccgtccaggttgacgcgcatggtcctgcgccaggcctcggtggccatctggtcgaacggccccttgttgccgctgcccacgccggcattggcaaagcagccgtcaatacgccccagcgccgccaccgtgcgctgcatggcagcatcgaccgcctgctcgtcgccgacgtcgcaaagctcggtatgcaccttgcgcccatgctgggccaggtggtcggcggcggcggcgttcttggcggcattcgtgccccagatcgcgatatcggcgccggccgcggccagcccttcggcaatgcccaggccgatgccgccgttgccgccggtcaccagtgccactttgccgctcaggtcgaatggatgctttgtcatgtgattgtctcctcggggggtgggacattgttcacatggcgaagggttcaaggcgtcgtcggaatggatgaaatcgccgaggcaggtgacgggcgccggaccggccatggccaccgccgccccatgacagcctaaagagcggctccctgactggcatccttatgcccggcaaattcacccggcgtacatccgaaatgccgcttgaaccgccgtccaaagtgagactggtcggcgaaaccgacaagcgtggcaaccaatgccaacggatagtctcccgagcggatcatctcgcgcgcgcgcagcaagcgaacgcgctcgacatacgccatcggcgtttcgccgatgctgcgcttgaacatgcgcgcaaaatgaaagcggctgacattggccatatccgccagcgcctgcagcttcaccgcctccggtgtaccgtggatatagtccaggaccctgctgagggcctgcggatggagcccgccgggaagtgacgaggcgcccgggtcactgacattgaagcgatgcactagatgcgccgacagcgcgcaggaaagggactcggcgatcagcatttgcgccggatgcgcgaccgcctggatctctcgcgccagcgtaaaggtaatagtctcggcgaagccgtcgcgctgcccgaagcaattgcggagcctgtgcgcggcgcgtggctggcggatcgtggcatcagcggcttcggccagcaggctttgcggaatcctcgcaatgacgatggaaccgggcctgtcccaactccagctggattcgaccagccgcgggtgcaggctgatattgccgggaacgacgatgccgcgatgcacctggcccagtcgccgctgctcaagcctggcgtgtcccgcgagtcgcatcgcaagcatgtcgtggtccagctccggagaggacaccgatccggccgagcgccagtgatggatctgcacggtgatgccagcccacgggcgtccgctgctgctgacatcgggacgaaccggcaactccgcatcgatcacgccatgtctcgtcggcgatcgcataggcacataccccgcaagggcccacaacggtagcgtcggggcaagggtcaggtccccgctgcgcatgaaagcatatgaatttatccggttgaagtaaagcggcccgcacaatccgcgggacctgacgcaagccatgccggctggtcctccttttcatacctatcatccaacgagtcagcgcaagaatcgtccagcgcagcgcaaccacgttctattgcgatgaccgccggtgcctgtagcgtttcaacgactgtcccaccagtccgaggcagccacacaccttccggtcccgaggcaggccagtgtcaggccaaacctgcagagacttgcagaatgcgcccccagtcgttccggcagttcgctgccgaagctggcgcaggcccgggcgaagtccctgtccccaaccgcccgaatcatccgggctatgcaaagaggaatgtcgactatgtccagttctgttcgttccgacgcaagccaaccacagcctggcgatagctacggctcaacccgcatgccgctgtgcctgacggtcaacggcacgctgcatcgcctcgatatcgatccgcgcgaatccctgcttgacgtactgcgcgagcgcctggacctcacgggcacgaagaagggctgcaaccagggcgcgtgcggggcctgcacggtgctggtggacgggcgccggatcaacgcctgcctggctttggccgccatgtacaacgacgcccacgtgagcacgatcgaaggcctgtcgtcggccgacggcgagctgcatccgctacaggccgcatttatcgcgcacgatggcttccaatgcggattctgtacggcaggccagatcatgtccggcgtcgcctgcatcaatgagggtcatgccacctccgccgacgatgtgcgcttctggatgagcggcaatatctgccgttgcggggcttacccgggggtcgtcgcggcgatcgccgaggtcggcgggaggatgctgccatgatcccgttcacactgcagaaagccggctcggaagctgaagcgctggcggcggccgcggccggggcccgcttcatcgccggcggcaccacgctggcggacctgatgcgcgagcacgtggaacagcccacgcaactggtagacatcaacgcgctgccgctgaaccatatccgcatggagggcgacgagctggtcatcggcgcgctggcccgcatgtccgatgtcgccgcgcatcccgacgtttgccggctccacccggtgatcgccgagtcgctggtcgagggcgcctctccccagttgcgaaacatggccagcatcggcggcaacctgctccagcgcgtgcgctgtccttacttccgcatgctcgatgccgcctgcaacaagcgcaccccggacagcggctgcgcggccatcgacgggttgcacgcgggcaatgccatcctgggcgccagcgaccattgctccgcaacgcatccgtccgaccttgcggttgccctggtcgcgctggacgcggtggtccacgtacggggtccgcacggcgcgcgccatttccgcgtggaagacctttaccgcctgcccggaaccacgccgcatctcgaacacaccttgcaggccggcgaactcattgccgaggtgcgagttccaccgctcgcctatgcacggactgcgcgctatctgaaagtgcgggaccgggcctcgtatgagtttgccctggtatctgccgcggcagccttcgaggtcagggatggcgtgatccaggccgctcgcctcgcatgcggtggcgtgggcacccggccatggcgcatgcgcgcggccgaactcgcgctgcaaggcaggccgcccacgcgcgcgagcttcgaggcggcagcgcttaccacgattgcaggcgccaccccgctgccaggtaaccactacaaggtcgcgctgctgcaacgaacggtggtacgggccctcgaactcgcaggagaaggcagatgaacgcaaaccatatcggccagccgcatgcccgcgtcgacgggcgcgccaaggtgaccggcagcgcgcggtatgccgccgacttcaaccagccaggacaggcctacgcggtgatcgtgggcgcttcgatcggactcggtcgcgtgatcgcactcgacgccgaagccgcgcgccgactgccaggggtactggcggtactgacgcacgaaaacgcgccgaaactggcgtacgccccacacaagggctttatcgatccggaacacggcgaacgtctgcatgtcctgcaggacgatcacgtccgcttctatggccagccggttgccgtggtcgtggcgcagacgctggaccaggccgagcatgcggcctgcctgctgctgattcgctatgccgaggaatcaccggtctccgacccgctcgaccagcgcgccgaagccgtggtgccggaggcgggacgcgaaccaggcccccattcggcggaccgggtccgcggcgaccccgaggccgcgctggcggcggctgccgtcagcatcgacgccacctacgatgccgcgcgagaaaatcacttcccgatcgaaccgaacgccaccgttgccgcctggcaaggcgaccagctgacgctctggagcaagagccagttcgtgatcaacgagcaggccgagatcgcggcgatcctcggcatcccgactgagaacgtccacgtcatctgcccgtttatcggcggcgccttcggcaccagcctgcgcacctggccgcatgtcacgctggcggcagtcgccgcgcgcgaagtgggcaagcccgtcaagctggtgctgtcgcggcgacagatgttccatcagacggggcaccggccgcgcaccgtgcagcgcattgcgctgtcggcaacgcccgacggcaggctgaccggcatcgtgcacgaaggcaccggcgaaaccagccgccatgagcagttcaccgaggcactcactgcggtgacgccgttcctctatcgctgtcccaatgtgcgcactcgctaccggctggtgccgctggacatcggcacgccgacctttatgcggggtccgggcgaggccaccggcgtctttgcgctggaatgcgcgatggacgagctggcctacgccctcgagatggatccgctggaactgcggcggcgcaatgaacccgggctcgacgagggcatgcaactgccgttctccagtcgctccatgcttgcctgctacgaacgcggcgccgacgcgttcggctggtcccgccgcacgctctcgcccggctcgatgcgggacggccgcctgcatatcggctgggggatggcctgtgccagctacccggtcttccacggccaggccagcgcccgcgtgcgcctgcttgccgacggaacggccgaagtcgaagccgccgccagcgacatggggcccggcacctacacctcgatcacgcagattgccgccgagacgctgggcctgccgatggacagcgtgcgcttcagccttggccgttcggatttcccacctaccccgccgcacgggggctcgatgaccctcgcgtccgtcggctcggccgtgcgcgcggcctgcattgccgcgctggaccagcgccaggcgcgcgcggatcgcacggacggcgccatcgaagcgagcgccacggcaggcccggatggcgaggtgcgcagccggttttccatgcatgccttcggtgccgtgttcgtcgaagtcgccatcgatcccgatgtcggcacgatccgtgtccggcgcgtggtcggcgcctatggcgcgggtcgtatcgtgaatccgcggctcgcagccagccaatgcacgggcgggatggtcggcggcatcggcatggcgctgatggagcgaaccgcgctggatccgcgggacggccggccggtgaatgcgcacatggcggattacctcgtgcctgtcaacctggatatccacgggctggaagcgcattttgtcgacgaggtcgatccccatgtgaacgaactgggcgtcaaggggttaggtgaaatcgcgctggtgggcgtggcgccggccgtggccaacgccgtgtttcacgcaacgggaaagcgcgtgcgggagcttccgatccgcatcgagcacctggtcgagcactagtccggcaagtgcgagacatgccgccgacgccgcccaaactgacggcgtcggcggggatccgcaggctcgacgcgattttgaaatgtatttctctaagggcttacccgaagacctagggttttctagtgtacgaaaacctaggctgccggggattgataaggtacttttctccccccaacaccaaaacactccgtatccgcccacgcgtcaaggaccgccggcgacaggcttcatcatgatcaaagatctacgcattcgttctgcgggcacgcaagatctgccggcaatttcgaaggttctcgcgcaatgcggcttggacgagcacgaaatcgaagcgcatctggagactttccatgttgccgtgctggaaggccgcatcgttggatgcgccggcgccgaacgatacgacgatctcgtcgtcatccggtctgtggccgtccttcccgaatatcgccagctcggggtggcgactcacctggtctccgcggtattgatgcgggcgcgcgcgcaaggcgtgcgtcgcgccgtactggcgaccagcaattgcccgagtcatttcgcccgctatggcttccagctggtctccgcggagaaccttcccgctgaagtccgcgcgtcgcacacgctcaggattgcaggcataccgccagggctgtgcatgcattgcgagctgaagtagacgcctctgcccgctcaatccgctctgttcgctctatccgcaattcacaggcacggggtctgtggcggcccacgcccgccggttgtccccaaatcggcactatgatggcggcattctccaccatccgttgccagtcatggacaaggcccgtgtcctcaccctcttcctcggcgtggtacgcgccggcagcttccaccgcgccgcggtggaagctggcgtcaccccgcaggccgccagcaaggccgtgcgcacgctggaggatcatctcggcgtgcgcctgctgcaccggaccacgcgcaagctcagcctgacggaagaaggcgcacgcctgttcgagctggccgcgccgggcatgcgccagctcgacgaagcgctcgagcaggtccgcagcagcaagagcgacaacgacggtctgatccgcctgaccgctccgccgtcgctcggcagccgcgtgctggtcccgctggtgcggggctttcgcgaacaatacccccgcatcaccttcgatgtagtgctgagcgacctcttcaccgacctggtcgaagccaagatcgacgtcggcttccgcgtcggcaccagccccggccagaacctggtggcgcggcggctgtgcgacctgccgctggtcatctgcgcggcgccggattacctggcgcggcacggcgagccggccaccctcgacgacttgctgcagcaccagtgcaccggcttccgccgccccgcgaccgggcgcatggtgccgtgggagctgcaggtggacggcgacctgatctaccaggaggtgcctgccgtggcgagcttcaatgacgtggaaaccgaggtcgaagcggtgcgcgccggcatgggcatcggccagctgcccgcctacatgatccacgccgacctcgtgagcgggcggctgaaggcgatcctgccggggtacagcagcagcaatgtcggcatgtacatgtactacccgcatcgcagccagatgccggtgcgggtccggcgcttcatcgacttcgtggtggaagcgggccggggcgcggagcagtcgctgtcacggctggtcggggtcgtgacctgagcctgctaccccgcagcacagacaaccagaagttgctattgaaacgccattccactctctagtgcgacgttcgctccacgcctaaattggtctcaacggcggctgcacagcgccatccccggaaccacaccgggaaacgcgcagcagccaccgtccgcctctttctctgatgaccagtctccaggagcgacatcatgattgcccaactcgcacgcacccttgttcccgccgccatctcgctggtggccgccgtctccctccagaacgccaatgccgcgcaagccggcaacagcgcgcccgccagcgtggcagcgcgcacgcatgacgtgttcaccgacggccagcggcagggccgcttcgacaccttctccgaaggcgcgcatgacagtggcgccactgcgctcgtcgccgggcccgaccgcagcggggtctcggccacgccggggcgaaagttcgatccgtacaccgagggtgcccgtgcggtcgaaggcaatccgcgcctgcgcggcacggccttgaatggcgcatcggcgtgggtgtgatcgcccggtccgaagtcgacgcaacgcggcaggacgagccctgaacggctgactccaatccccggacaaagcgcttttccagacgccctgcctcgccttgtcgtttgattttttctcaaccgaaaacgccggaaatatcgtttgtcgcgcaggccgccgacgacaactattacgccaaggccaacccacaggagacagccatgtcagaccagccctatccgctctggagcgcggaacccgtcccccacctgctcgcctcgcgtgaccgcgccaccggcgagtggatcttcccggcgctgcccgccgactctccgctggcggacggccacgagaccgtcgccatcaccggcacgggcgtgctctacagcttcaccgtgatccatcccgcgcccaagagcggactggctccgtatgcgctgggttatgtcgatttcgtcgggccggtgcgaatcttcggccgcctgcagggcgcggcgcgtccggtcatcggcgaacgctacgcgcagcggcatgacgccgagctgggctatgtcttcgaggccgtcacggtctgatcgatcgagagaaggagaggtaagcaagatgcaggacatctacatccatggcggcgcgatgacgccgttcggccggcaccccggcgtgctggcgccggagctggcgcaacaggcaatcctgaaggcgctggccgatgccgacgtgccggccggccgcatccaggcggtctactgcgccaacgtcctgggcggcatgatcctcggccagctgatcgtgcgcgatctggggctcaagggcatcccggtctacaacgtcgagaacgcctgcgccagcggcgccaccggcgtgcacctggcacggcacgcgctgctggccgggcaatacgacacggtgctggtcttcggcatcgagcagctgaccgcgctcggcggcggcaccatcccgctgcagcgcaatgaccacaagaccgacctctatgcgaagtccggcatggtactgcccgcggtgtatgcgatgcgcggcacgcgtttcctgcacgagcgcgacgccaatccgtccgacctcgctgaagtggccgtgaagaaccgctaccacggctcgctgaacccgtatgcccagcagcgcaagaccaccacggtcgaggaagtgctggcctcgcgcatgatcgccgacccgctgacgctgctgcagtgctgcccgtcgcaggtcgatggcgcggcgtcggtggtgctgagcacgcgccggccggcgcaggcgcggccggtgaaggtgctgtcgtctgtagtggtgtcgggcatgcgcgaggaggccgacgacgatatcctcgatgccgagatcaccgcgcgcgccgcgcgccaggcttacgaacaggccgggctcggcccgcaggacgtcgacgtggtcgaactgcacgacgccttcaccatcgccgaactgctctactacgaagccctcggcctggcaccgcgtggcgatgccgtggcgctgctcaagtccggcgcgacgcgcctgggcgggcgcgtgccggtcaacccgagcggcggcctgctggccaaggggcatccgctgggcgccaccggcgtggcgcagatggtcgagatcctgtggcagctgcaaggccgcgccggcgaacgccaggtggcggatacccgcatcggcctgacgcaatgcaccggcggcggcatcgcgggcgtggaccacgccgcttcttccgtccacctgctgggagtctgagatgggcacgcaacgcttcgatccttcccatgtggcggtggtcaccggcgcagcgcgcggcatcggcctgggcatcgccacgcaactggcccgccaggggctggccgtggccctgctcgaccgcgacgccgccgcgctcgataccgccgtcggtgcgctggttgccgagggcttcaacgccttcggcgccagcgccgacctgaccgactcggccgccgtcaacgatgccttcgcgcaaatccaggcgcgcactggccgcgtcgactacctggtcaacaacgccggcgccgtgcgcgacatgcgcttcctgaagatgaccgacgacgactgggacctggtcatcgataccaacctgcgctcgcagttcctgtgctgccgcgcggcgctgcccggcatggtcgagcgcggctacgggcgcgtggtcaatatctcgtcgcgggcgtggctgggcggattcggacaggctaactactccgcggccaagggcggcgtagtcagcctgacgcgctcgctggcgatcgagtttgcgagcaagggcgtcaccgtcaatgcagtggcgccgggcatcgtcgataccccgctgttccgcggcttcgcgcccgacgtgcaggcccggctgcagaagtcggtcccggtgcagcgcatcggcaccgccgacgatatcgccaacgcggtcagcttcttcctcgacccgcagtcgtcctacgtgaccgggcaggtgctctatgtctgtggcggccgcagcctgtcgtcgccaagcgtgtaaggaggcaagccatgaccgtacgactccacaccgaaggcgcggtcgccgtgctaacgatcgaccggcccgatgccctcaatgcgctggacgtggccgcgctgcgcgaactgcgcgcgcacctcatcgaagtgcgcgaccgcgacgacctgcgcgtggcggtgctgaccggcgccggcacgcgcgccttctgcgcgggcgccgacctgaaaggcacgcgcagctcgcccgcgacctatccggaagcactgttccgcgcgccggagcaggccgccgacctggggctctatatccggctgatggacctgaccgacctgggcctgttcaagccgctgatcgcggcggtcaacggccattgccttggagcggggcttgagatagcgctgcaatgcgatgcgcggatcgcgtcagaacaagcgagcttcggcctgcccgaagccgcggtcgggtcaatccccgctgtctcgggcttgcatcgcctgctgaaggccgtgccggcggcgcatgcgatgcagatggtgctgaccggcgagcgaatcgacgcggcgcaggccgcgcgcatcgggctggtcaccgagacggtggcgcctgccacgctgctcgaccgtgcgctggcgatcgcgacccgcatcgccgccaatgcgccgctggcggtgcaggccgtcaagaagctgtcgcgccagaccagccacctcagcgaagccgacgcccagcaactgaccgaactctactggggcgtgctgcgcgataccgcggaccgcaccgaaggccggcaggccttcgccgagaagcgcgagccccgctacaccgggcgctaagcgttcgcaaacagaaagacaggagacagaccatgacccgcattacccgattcgcacgcgtggcgctggccggcatgctggcagccacggcgctgggcgccgcggcgcaggcgcccttcccaaggcaaaaaccgattacgctggtggtgccgttcgcccccggcggcggcaacgatatcctcgcgcggctgatcgcgccgaagatgggcaagctgctgggccagaccgtcgtgatcgagaacaagcccggcgcgggcggcaatctcggcgccgactatgtcgcccacgcggctccggacggctatacgctggtgatcgcatccagccaggtgacgatgaacccgtttctcggcacgaagattccgttcagcatcgaacgcgacttcgagccggtggggcggatcgcgtcagtgccgatcatgctggtcgccaaccccgaccagccgttccgcacgctgcaggattttatccagtacacccgcgccaatcccggcaagctcagctatagcagcccgggcaacggcacgccccagcacctggccggtgaagtctttgccaggctcaacaagaccgaactgctgcacgtgccctatcgcggcaccgggccgtcgatcaccgacctgatgggcgggcaagtgcagatctcgttcgcgacctttgcttcggcgatccagtatgtgcgcgccggcaaactgcgcgcgctgggcatcgccggcaagaagcgcaccgcgctcatgcccgacctgccgacctttgcggaagcaggcatcgccggctacgacgccgagctgtggtacagcctgctggcgccggcgcagacgccgaagccagtggtcgacaagctcaacgccgcactggtggccgcgctgaaatcgcccgacatcgccgagcagatggcaaagcaaggcttcgagccgcaggcgtcgtcgccggccgagctgaagacctatatcggcaaggaaatggcgcgctggcagcggctgatccaggacaacggcatcaaggtggccttatgaacatgcatcccgccacggtgccgtcaaccgacaacccgctgctggactacctcggcatccgcctggccagcgtcggcgacggccgctgcaccttcgagctcgacctcgagccacgccacctgaaccggcagggcagcgtgcagggcggcgtcaccgccacgctgctcgacgccgcctgcggctacgccgggttgcccgccggcccggacggcacgctcggccacgcggtcaccgtcatgctgacgatcagctatctcagcaaggccagcacgggccggctgcgcgccacggcgcaactcacccgcgccggcaagagcctgtacttcgcctcggcggagctgaccaccgatgccggcgtgctggtggcgaccgcgcaaggcacgttcaaacgatcccgcaccctaccggaggcatgacatgttgcgcgacgcactggacggcctgaccgtcatcgatttcacgcagatcggcgccgggccgacctgcaccatgctgctggccgacatgggcgcgagggtcatcaaggtggagccgccgggcggtgagatgggccgcgggctggggcccggctggctcggcgacgacagcgcgctgtttcacggcttcaaccgcaacaagctgggcgtggcgctcgacctgaagtccgccgacggcgtggccgtggcccgccgcctgatcgtgggtgccgacatcgtggtggaaagcatgcggcccggcgtgatggaacgcctcggccttggccatgcgcaactggcggacgaacaccccgcgctgatctactgctcgatctccgcctacgggcaggagggaccatatgcgagccgcgccggcgtcgacggcatcatgcaggcggattccggcctgatgagcctgatcggcctgcccgacggcgagccgtgcaaggtgcaggcgccggtcgtcgacgtgatgaccggctacgtggcctccgtgggcgtgttggcgaagctcgcgcagcgggcccgcgacggcctgggcggccatctcgacgtcaacctgctcaatgcggcgctggcgctgcagcagtcgtccatcaccagctactgcgccgacgggcaactgccggaacgtgtgggcagcgcggcgccctactcagcgcccaaccaggccttccgcaccgccgatggctgggtcatggtggccgcctatatgcccgagcgctggcgccggttgtgcgatgtgctgggccggcccgaactggccggcgatccgcgctttgcgacttcaccgctgcgcgtggtcaatcgcgcggcaatggtggaggtgctgaccagtgccttcgtcacccgcgcgaccgacacatggctggcgttgctccaggacgccgacattctgtgcgcccccgtggcgacctacgaggacgtcatggcgcatccgcaggtggccgccaaccgcatggtgcagcgcgtccggcacgacacgctgggcgagatccgcatgccgggattcccgatcaacagcgctcaggagaacgcgttgccatcgcggccggcaccagcttgcggacagcatacgcaggcggtgctgggcgagcttggctacagccgcgacgaaatcgccgcgctgtcgtctcggggcgctatccgctgcggcgatatcgaggaaaagcgacacgtggtcgcggcggcatcgtgagcgcgctcaaccctgagtgtcaaactgcgccagcagccattgccggaacactgccatgctcgggctctccttgcgatcggcaggcgtcagcaggtagtaggtgaagtcgcccatgtccacagtctggcggaatggcgccaccagccggccggcgtcgagatccgccgccaccaggaagcgctgcgcgatcgcgaagccctgcccttctgccgcggccgcataggccatggccgagctctggaaggtcatgccgctgcgcgcatcgacctccttgtcggcgcgcgcggccttgagccagtgggcccaatcgtcgggccgcgcgatcgagtgcagcagggtctggtgctgcaggtcggcgggcttcttcaccttcggcccgccctccagcagccccgggctgcataccggcaccaggatgttcgacaccagccggtaggtattcacgccgctccacttgccgtcacccagcctgatcgcgccgtcgatgtcttccttgcggaagtcgaccggatcgagcgacgccgtcagcagcacctcgatgccgggattggcggcatggaagctcgacagccgcgggatcagccagcgcatggcaaaggtggtgtaggcgcgcaccttcagctgcttgcgcttggcgcgcttgctcaatcgccgcgtggcctcgcgcaggtcgtccatcgccctggtcacggcgcggtagtagtcctcgccggtgcgcgtgagcgagatctggcggtggccgcgatgcagcagctgcacgcccagcccgtcctccagcgcgcggatctggcggctgacggcgccgggggtgacatgcagctcctcggcggccgtggtgatgctgaggtgccgggcggcggcctcgaaggcgcgcaacgcgttcagtgggggcagtttgtccatgccggggagtctgccatacggttgaggctttctcaatcgacgcgccggacttccattcaaaactaatagttgtcattgaaacgcgattgcaccgcctagtgttgtgggcgttgcctgcctaaatttgtctccgtggcccccgccatcagacatcgcagtcaaaccgagcaccctgaaaggagattcaccatgtccgccaacaccaccaacaccgccatcaacgctgccagcaaggtctggttcatcaccggcgcttcgcgcggcttcggcctggaactgacccgtgccgcgctggcacgcggcgaccgggtcgtcgccaccgcgcgccgcccggaaaccatcaccgccgcactgggcgagcacgataacctggtgggcgtggcgctggacgtcaccaacgaagcgcaggccatcgccgccgccgaggccgccgtggcccgcttcggccgcatcgacgtgctggtcaacaacgccggctacggcctgctcggcgcggtcgaagaggcctccgcagaggaagtcgagcagcagttcgccaccaacgtgttcggcgtgctgaccgtgacgcgtgcggtgctgccgcagatgcgccgtcagcgcagcggccgcatcctcaacatttcgtcgatcggtggctacgccgcgtatcccggctggggcgtctatggcgccaccaagttcgcggtggagggcctgaccgaagcgctcgatgcggaactgtcgccgctgggcatccgcgccaccgtggtcgagccgggcttcttccgcaccgacttcctcgatgccagctcgctggtgcgcgtgcgcaccgagatcgccgcatatgccgatacggtcggggcaatgcgcgagcacatggcttcggccaaccaccagcagcccggcgacccggccaagctggcggcagccctgctgaccctggccgacagcgaaaccccgccagtgcggctgccgctgggctcggacacggtctaccgcatcaccgagaagaaccgcaaggtggaaagcgaactggccgcgtggcaggcgctggcggtgtcgaccgaccacgacgacgtgcgccgctgatcttgctgcagcgcaccagcgcacggtttgctgcaatgcgggcatgccgtgcgaaacgcgaaacgaggccgaccgagcgccggcttcgccacttgcgggccatcttgcgtcaggcaatgcaccgagtcgggcatccgcgtatgtcgcttccggcgaatttcgccaataattcccggacagccattgccggacgagagccaccatgcacgatagtcccgatgccatccgcaccgtcgccttgctagggcacgcggggtgcggcaagacctcgctggtcgaagcgctgttgcacaagggcggtgccctgcacacgcccggcagcgtcgaacgcggttccacggtgtgcgacagcgacccgctcgagcgcaagtacaaacgctcgctcaccaccgccgccgcccacctgcactaccgcgacacccgcatctacctgcttgacacccccggttatcccgacttctccggcctcgccatcagcgcgctggcggcggtggaaaccgccgccatcgtcatcaatgcccagaccggcatcgagatgaccacgcgccgcgcgatggcgtgggcgcaggcgcgccagctgtgccggatgatcatcgtcaacggcatcgacggcgacaaggtcgacctgcccgcgctgcttgcggacatccaggaggcctttggcaaggaatgcctgccgatcaacctgcctgccggcaacggcagccaggtggtggactgcttcttcaatccggccggcgagtcggattttttatctgttcccgccgcccacgatgcgctgatcgaccaggtgatcgagatcgatcccgaactgatggagctgtacctggaacaaggcgaggcgatcacgccggagcagctgcacgcgccattcgagcgcgcgctgcgcgaaggccacctggtgccgatctgctttacctcggccgccaccggcgccggcatcacggaactgctcgacgtgttcgtgcaactgctgcccaacccgactgaaggcaatccgccgctgttctatcgcgatacgggcgatggcagcgaacaccgcaaggccgtgcgcgccgagcccgtgcctgacaagcacgtgctggcccatgtcttcaaggtggtgatcgacccctatgtcggcaagctggcggtgttccgcatccaccagggcacggtcacgcgcgacagccagctctatatcggcgacgggcgccagccgttcaaggtggcgcacctgctgcggctgcagggcaaggagacccaggagatcccgcgggccggcccgggcgatatctgcgcagtggccaaggtcgacgaactgggcttcgatgccgtgctgcacgacgccaccgaggacggcaatatccacctgacgccgctggagttcccaactcccatctacgggctggcgatcgaaccggcgcggcgcggcaacgagcagcgcctggccgaagtgctgcacaagcttagcgcggaagacccgtgcctgcgcgtcgagcatccggttggcaccaatgagaccgtggtgttcggcctgggcgaattccatctgcgctgcgcgctggagcggctgaccgagcaatacaagctggaggtggtgacgcgcccgcccaagattgcctatcgcgaaaccatcggcggcaaggccgagggccatcaccggcacaagaagcagaccggcggcgccgggcagttcggtgaagtgatgctgcgcgtggagccgctggcgcgcggcgagggcttcgactttgtcgatgcggtcaagggcggcgcgattcccggccagttcattcccgccgtggaaaaaggcatccgccaggtgctggacagcggcccgctggcgggcttcccgatgcaggacgtgcgcgtgaccgtgtatgacggcaagagccatccggtcgattccaaggaagtcgcgttcgcgaccgccgggcgcaaggcctttatcgacgcggtgctcaaggccaggcccagcgtgctggaaccgatcgtcgacatcgaggtgacggcgccgggcacagccatgggcgacatcatcggcgacctctcaaccaagcgcggccaggtccacggcacgcgcaccgcggtcggcaacgccgtggtggtggccggccaggtgccgctgtccgagctcaacgactaccagtcacggctgaacagcatcaccggcggccacggcagctataccatccagttcagccactacgacaacgtgccgccggcgcagcaggacaagatggcatcgaaacacaaggcgcagcaggatacggattgaggggttcgcgcccgcggctgcatctagtacgtttccagatgcagccgcccttcccgcttcaacccttcagccagcgcctcccattgcagccccgcctgctgcgcgacgtccctgagcgccagcaccacgccctcttccatgctctttagcccgcacacatagaagcaggtatcgggacccgccagcaacgctgccaggtccgccgcgcgctcgcgcatcaggtcctgcacgtagcgcttcggctgccccgccgtgcgcgagaacgccaggttgatgtcgatgaaatccttgggcaggttctgcagcgggccgaaatacggcagctcctcctgcgtgcgcgccccgaaaaacagcatcagcttgccgccgtcgaacttgccggccttgcgcaagcgccggcgccattcggtcatggcccgcatcggcgcgctgccggtgccggtgcagatcatcacgatgttggagcgcgggtggttcggcatcaggaagctggcgccgaacgggccgatcacctccaccttgtcgccaaccttcaggtcgcacatgtagttggaggccacgccgcgcaccgggttgccgtcatggtcctgcagcacgcgcttgatggtcagcgacaggttgttgtaaccgggacgctcgccgttgcgcgggctggcgatcgagtactggcgggcatggtgcgggcggccgccggcgtcggtgcccggtggcacgatgccgatggactggccttccagcaccgggaacggggtcgcgccaaagtccagcacgatgtgatgcgtgtcgtactcgcgccccacttcggtcacgcgtacattgccggtcacggtagcggtgatggtcttgttggcggacttggcgccatacaggttggtgtaggcatgcgcggcggaccacggcggcacggtggcgccgtagcgggcgctgttgacggcgtcttcgccggtgccggccagcggcgacgcggcgggaatctccggcgcggcggtctgcagctcggcgccgggcgccaggtcggccagttgctcgggcgtcagctcttccggcagcgtgtcccagctgagttgctcttcgatgctgtaggcgcgcagcttcggcatggcgcgccagttgtcgatcgagccggtcgggcacggggaaatgcaggccatgcacaggttgcacttgtcggcatcgaccacgtagttgcgcgagtcgtgcgtgatcgcgcccaccgggcaggtcgcttcgcaggtgttgcagcggatgcagatctcgggatcgatcaggtgctgcttgatgacttgaatttctgccatgtccatggcggtctccacaggatcaggggcgttcggggtgagggtcgttgttgcagcggcgcttcatggacgcgcctgccctctcccccggcccctctcccgcaagcgggagaggggagcaaacagggagcaaagggtaaggccgtggctcagttgaaccgcacgtactcgaaatccaccggctggcggttgatacccatcaccggcggcgcaatccagttggcgaacttgcccggctcgaccacgcggcccatcaggctggcgacaaaggcgcggtcgccttcactgggcagccactggtcgcggaagtcgcgccattcggcgtcagagatcacgcggccgtccggcgataccttgacacccgccagcgcgccgatattgcggtggaaggccttgtgcggcaccttcaggcggaacgggatgccggccttctcgatgaccttgttccagcgctccacaccgcccatgctgtccttgatgtagtcgtcgcgcagcacttcgttgagcgcgttgagcatcggcacttccttctcggtcagctggccgttctgcgcctgcaggatgcggtaggtctgacccttgagcacgtggtcgtccatgcgcttgccttcttcgtagcggcccttgaggccggtgctgtagaaggtggcggcgttgctcgactcatcggcgccgaacaggtcgatggtgacgctgtagtggaagttcaggtagcgctgcagcgtcggcaggtcgatcacgccggccgcgcgcagcttggcgggatcgtcggtcttgagttcgttcatcacctggcaggtgcgctggatcacgcgcgacacgccggactcgcccacgaacatgtggtgcgcttcttcggtcagcatgaacctggtggtgcgcgccagcggatcgaaggcgctttccgcgagcgcgcacagctggaacttgccgtcgcggtcggtgaagtaggtgaacatgaagaacgacagccagtccggggtctgttcgttgaacgcctgcaggatgcggggattgtcctgctggccgctgcggcgctccagcagggcctcgccctcctcgcggccgtcgcggccgaagtacttgtgcagcaggtagaccatcgcccacaggtggcggccctcttccacgttgacctggaacaggttgcgcaggtcgtacatgctgggggcggtgaggcccaggtggcgctgctgctcgaccgacgccggttcggtatcgccctgcgtcacgatgatgcggcgcaggttggcgcggtattcgccgggcacgtcctgccaggcgtcttcgcccttgtggtcgccgaaatggatcttgcggttggcctcggccgggttcaggaagatgccccagcggtagtccggcatcttgacgtggccgaagtgggcccagccctgcggatcgacgctgatcgcggtgcgcagataaatgtcatggctgtgcgagccttccggccccatgtcgttccaccagctcaggtagttgggctgccattgctcgagcgcacgctgcagggtgcggtcttcgctcaggttgacgttgttggggatcttgtcgctgtagttgatgccggacattgtggtctccttcaggggacgattcggttgtcgtgtaaggctggatcagacgcggttccagtcgaaggcggctttgtcgcccttgccgtagaccttgagcgcacccttgtcgcccaccgcgttggggcgctggaagatccagttctgccatgcggtcaggcggccaaagatgcgggtgaacatgttttcctggccgttgaagcgcaggttggcttccataccggtgagcgcatcgggcgacatcgccacgcgctcttccagcgcgatgcgcacttcgtcggtccagtcgatgtcgtcggggttggcggtgaccaggcccagcgcatacgcggcatcggcatccagcggctggccggccttggcgcgcaccgcgtccagcgcgggctgctcgtcgtagaagcggcggcccagccggctctggccggtggccatcgggtacaggccgaaattgacttccgccacggtgatcttcggcgcgcgctcctcgtcgtccggcagcgccaggtggtagctgcggtcgcaggccagcgccagttccaggaaggtgccggcaaagcacgattgcggctcgatcagcgcgaacaggctgcgcgacgacacatccaggcggctcagcgtgcggcgcagcaggccgatggtctcgcgcaccagccagtggtccttgtgcgccagcagcgcggcgtcggtggccagcaccgcggcggcgtcgccgctggtcttgatcagccaggtgccgatgtccagttcattggtgcgcatcgacaggatcgcgtcttccagttcgcgtgccagttgcagcgggtaccaggcggcgccggcggcgacgatctcctcgatgctttgcggttgcgcaccgacgggtgccttcacggtaaaggtcgcggtacggccggcgcgatcgatctcgaccgtcacatgcatatagcgcagcgcatccgcttcgatcgtccgctcgatcggctcgagcgccacgccctgcgcatcggccggacgatcgctctgcgcggccagcgccagcgcgcgctcctgcaccttctgcgcgaacacggcgggcttggcgatatcgtcgaccaggcgccagtccttggcacgctggccgcgcaccccttcggtggtggtgcagaagatatcggcgaggtcatggcgcacatggcgcttgtcggtcacgcgggtcaggccgccggtgcccggcagcacgcccagcagcggcacttccggcaggctcacggccgacgagcggtcgtccaccagcaggatctcgtcgcaggccagcgccagttcatagccgccgccggcgcacgcgccgttgaccgcggccaggaacttcaggccgctgtgctgcgacgagtcctcgatgccgttgcgggtctcgttggtgaacttgcagaagttgaccttccacgcatggctgctgacgcccagcatgaagatattggcgccggagcagaacaccttgtccttgccgctggtgacgaccacggtgcgcacttccgggtgctcgaagcggacgcggttgagcgcgtcgttcagttcgatgtcgacgccgaggtcatagctgttgagcttgagcttgtagccggggcgcaggccggcgttctcgtcgatgtccaccgccagcgtggcgacggggccgtcgaacgtcagcttcaggtgtttgtattgggcgggggcggtctggtaatcgacgcggggggcggtggtcacggcggtgtctcctctgcgaaactgcactatcgtgcatgaacaggaatctggtaacacgaactatagttcatcaatcagatttcatgcaagcactattgtgcagatccttcaagaggtgcgggtcaccgctccggatgccgggttattgcgcccctgccgtcacaacggcatgcgcaaggcctggcgtaccagctcgcgcagcgcggcaaatgtgggttccagcggctgagcgctggtgtccagcgagaactccgccttggaatagaaggccgcgcgcccggccaggatatggcgcaggtcctccatcgcctccttgctggccgccatcgggcggaagtcgccctgctcgcgcacccgctccatatggtcttccggctccgcctgcagccagactgtggtgcagtgggccagcaacaggttgaaggtggccggatcagagaccaggccgccgggcgtggcgatcacggcctcgggatagatctggatggcttcttccagcgcgcgccgctcgtagcggcgataggcgttcatgccatacaggccctggatctccgagatgctgcagccggcaaacttctcgatctcgcggctcagctcaataaaggggaagtcgaggtcttcggccagcatcccgcccagcgtgctcttgccggcgccgcgcagcccgatcagcgccacacgcgggctgcgcgcagcctggccggcattctcgccacccgtgccgagcatctcgcccacggcaatgcgcacgcgccgcagcgtggcttcgtcgcggtgctccagcagttcgcgcaacaggatccattcaggcgacgacgtggtgatgtcgcccagcagcccggccagcgagcactgcagcgcatcggcaatgtgctgcagcaccaggatggaagcgttgccgctgccgtattccaggttggccaggtgccgctccgacacgccggcggcctgcgcggcggcctttcgggtcaggccgcggcaggcgcgcaactcgcgcacacgctcgcccagcgcgaccagaaacgggttcttgtcagtgccgttggcagcacgtgcatctgaatcatgatgcaggtcgacttccggggttaacccagattcatgcaatatagtgcttgacatgatttcggcgcggctctatttttcatacatgcacaataatgcatgaagccagtgatggcaactggcgaaccagacggagcccccccactatgtcccccacagaattccgcagccagatcgcgcagttcaccgcgcaactggcaggccgtccgctggatgccgcactcgatgcctggctcaatgccgagcacggcgccggcagccccacctaccagcaacttaaggacgcctgccaggccggcgtggccgaaggctggctgtgcgaccgcgaaggcggcggcatccgctacggccgcatcttcaagccggccgacgacctgcacggcttttccgtcgacgtggtcgagatgcaggacattgccggcccgcatcacacccatcccaacggcgagatcgacctgatcatgccgctcgagggcgacgcgcagttcgacggccgccccgccggctggctggtatgcccgccgggcagcgcccaccgccccaccgtcagcaacggccgcgcgctggtgctctacctgctgccggaaggccgcatcgacttcacgcgctgagattcccgatgactgaattgctatccaactatctcggcggcaagtggcaggccggcagcggtgccggcacgcccttgttcgatccggtgctgggcgacgaactggtgcgcgttgacgccaccgggctggacctcgctgccggcttcgcctttgcccgcgaacagggcggcgcggccctgcgcgcgctgacctatcgccagcgtgccgcgttgctggctgacatcgtcaaggtgctgcaggccaatcgcgatgcctattacgacatcgccacggccaacagcggcaccgtcaggaacgactccgcggtcgacatcgacggcggcatcttcacgctgggcacctacgccaggctgggcgatacgctcggcgaccggcactacctgccggatggcgaggccgtgcggctgggcaaggacccgttgttccagtcgcagcacgtgctggtaccgacgcgcggcgtggcgctgtttatcaatgccttcaacttcccgagctggggattgtgggagaaggcggcgccggcattgctggccggcgtgccggtgatcgtcaaacccgctaccgccaccgcctggctgacccagcgcatggtgcgcgacgtggtcgaggccggggcgctgccggccggcgcgttgtcggtggtgtgcggcagctcggccggcctgctggaccagttgcagccctttgacgtggtgtcgttcaccggttcggccgatacggccgcggtgatccgctcgcatcccgccatcgcgcaacgctctgttcgcgtgaatatcgaagcggacagcatcaattccgccgtgctgctgccgcaggacggccccgataccgccgccttcgacctgctggcgaaggaagtcgtgcgcgagatgacggtcaagtccggccagaaatgcaccgcgatccggcgcgtgttcgtgcctgaagcgctgtatggcctggccgccgaggcgatcggcgcacggctgtcgaaagtgaccgtgggcaacccgcgcaacgatacggtgcgcatgggtgcgctggtcagccgtgcgcagttcaacgccgtgcaagacgggctggcaaccctgcgcaagcacgcacaggtgctgcatgacggcacgcagcaggcgctggtcgatgccgatccggccgtggcctgctgcatcggcccgacgctgctgggcgtggccgatgcggacgccgccgccgcggtgcacgacaccgaagtgttcggcccggtggccacgctgctgccctatcgggataccgcccacgcactggcactcgtgcgccgtggacagggctcgctggtggcatcgctctatggcagcgacgcggccgcgctcggtgcggccgccgtcgagctggccgacagccatggccgcgtgcatgtgatctcgcccgacgtggcgcagctgcacaccggccacggcaacgtcatgccgcaatcgctgcatggcggccccggccgcgccggcggcggcgaggaactgggcggactgcgcgccctgcacttctatcaccggcgcagcgccattcaggccagtaccgcggtgctcgacgaactcgcctgaccgttcaagccaacccgcttcaccgcgccgccacgtccgcatggcggcgcgcggcacaccgtacaccagcaacggggagacacccatgaccgccacacccgcagaaccacccgtccggccacccggcacgtccttcaactttgccgggcacctgctcggctgcaatgccggacgcgccggcaaggtcgcctatatcgatgacgacggccagctcacctacggcgaactggcgcagcaggtgcggcgcctggccgcggcgctgctcggcgccggcatccgccgcgaggaacgcgtgctgctgctgatgcacgactgcagcgactggccggtctgcttcctgggcgcgatgtacgccggcatcgtcccggtggccgtcaacacgctgctgaccgccgacgactacagctatatgctgcagcacagccgcgcgcaggctgtgctggtgtcggccgcgctgctgcccgtgctgcaggaggcgctggcccgtccggggcatgaagtcgggcaagtgttcgtgtcccgtgcgcatgagcctctgcccgatggcatgacggcgctggatgcgctgcttgccgcgcaaacgccgttgcaggcgcctgccgccaccagttgcgacgatcccggcttctggctctactcgtccggctcgaccggccagcccaagggcgtggtgcacagccacggcaacccgtactggaccgcggcgctctatgcaggcccggtgctcggcttgcaggagcaggacgtctgcttctctgcggccaagctgtatttcgcctacgggctgggcaacggcctcagcttcccgctcagcgtgggcgccaccgtggtgctgatggccgagcggcccacacccgaggccaccttccgccgctggctgcaacaccggccaacggtgttcttcggtgcgccgacaggatacgccggcatgctcgcctcgccggcgctgccgcagcgcgccgaggtcgcgctgcggctgtgctcgtccgccggcgaggccctgcccgccgatatcggccagcgcttcaccgcgcatttcggctgcgagatcatcgacggcatcggctccaccgagatgctgcatatcttcctgtccaaccgccccggccaggtgcgctacggcaccaccggctggccggtgccgggctacgccatcgagctgcgcgacgaagaaggacgcccggtgcccgacggcgagatcggcgacctctatatccagggccccagcgccgcgctgatgtactgggccaaccgcgagaagtcgcgcgagaccttccgcggcggctggaccaagagcggcgacaaatacgtgcacaacccggatggcacctacagctacgccgggcgcagcgacgacatgctcaaggtcagcggcatctacgtttcgccgttcgaggtcgaggccacgctggtgcagcacccggcagtgctggaggccgcggtgatcggcgtacccgaccatgaaggactggtcaagaccaaggccttcgtggtgctgaaggcgggcgcgcagcttggcgacggcgaactgaaggccttcgtcaaggagcggctggcggcatacaagtacccgcgcgcgatcgagttcgtcgatacgctgcccaagaccgccaccggcaagatccagcgcttcatgctgcgcgaacgcgaactgaaggccgccgcagagcgcgccgtcgcggcggcgtgagcggcaacgccgcccgccccgtcataccaccataccggagacaaaccatgcgtcagatcgatgtccacaagctggccgacgaggcccgcttcaaccgcttccatgcgctcatcctgttctggtgtgcgctgatcatcatcttcgacggctacgacctggccgtggccggcatcgccctgccgtcgatcatgaaagagatgggcgtgaccgcaaccagcgccggcttcatggtcagctcggcgctgttcggcatgatgttcggcgcgatcttcctcggcaccgtggccgaccgcatcggccgcaggcgcgccatcgccatctgcatcgtgctgttcagtgtcttcaccgcggcggcgggctttaccagcgacccggtgacgttcagcgtcacgcgcttcctggcgggcctgggcatcggcggcgtgatgcccaacgtggtggcgcagatgaccgagtactcgccgcgcaagctgcgcggcacgctggtgacgctgatgttcagcggttattcggtgggcggcatgctggccgcgctgctgggcaagggactgatcgaaagctatggctggcagtcggtgttcctcgccgccggcctgccggtgctgctggtcccgctggtgctgcgctcgctgccggagtcgatgccctacctgctccgcaccggccagaccgacgctctgcaatccgtggtatcgcgcctggtgccgtcgcatcgcgcgcaagccggcgacgtctttacgctggctgcggacgacaaggccggcagcgcgccgatccgccgcctgttccaggacggccgcggcttcagcacggtgatgttctgggtggcgttcttcatgtgcctgttcatggtgtacgcgctcagctcgtggctgaccaagctgatggccggcgcaggctacagcctgggctcggcgctgactttcgtgctggtgctgaacttcggcgccatgctcggcgccatcggcggcggctggctggccgaccgcttgccgatcaagcatgtgctgatcggcatgtacacgctggcggcagtgtcgatcacgctgctgggctacccgatgcccagcgcagcgctgttcgtcgtggtgggcctggcaggtgcttccaccatcggcacgcagatcgtcacctatgcctatgcgggccagttctatccgatggcggtgcgcggcaccggcatcggctgggcgtccggcgtgggacgcagcggcgccatcctggcaccgatcgtgatcggcgtgctggttgggatgtcgttgccgttgcagcagaacttcatggcgatggcgattccggcggtgattgcagtgggggcggtgtcgatgatcaaccaccggaggtcggcgtcggcgcaggcggaagtcgctgcggcgccggtgcgaggaactgtgaaggaagcctgagagaagtcaaccgccagttgttcgctccctctcccgcttgcgggagaggaagcgaaccggcagcgctgaaaaggacgtagcttacttgctgcccttcaccgtcgtgtacgccgtaatcaaattccggtaatccggaatatggttcgagaacagcgtgcccagaccctcgatgtcgttgcgccagtcgcggtgcagttcgcaagccacaccgaaccacgtcatcagttgcgcgccagcatccgacatccgctgccaggccgaatcgcgcgtgatttcattgaaggtgcccgaggcatcggtcacgacaaagacttcgaaaccctcttcgatcgccgacaacgccgggaaggccacgcacacttcggtgaccacgccggcgatcagcagctgcttcttgccggtggcacgcaccgcggcaacaaagtcctcgttatcccaggcgttgatctggcccgggcgcggaatgaacggcgcgtcagggaacatggccttgagctcaggcaccagcggtccgttgggaccatcctcgaagctggtggtcagcacggtcggcagcttgaagtacttggccaggtcggccagtgccagcacattgttcttgaacttgtcgggctcgatatcccgcacgagcgacagcaggccggcctggtgatcgaccatcaggacggcggcctggctcttgtcaaggcgcttgtagggcttgctcatggtgtgctcctgtcaacaaaaaaaggtacgcacgcttggcttgagccacgcgtgcgtacccctgggtatgccgtgcgttaccggcaaggcgtcagcgctgggagtccagcacctcgtgcttcttctcgacgtcctgcgccttgagatagctttcaatcagcaggcggtaggccgggaagatctgcgtgtagacctcggcccattcctgcgcgtccggacggttccagctctgctgcagctccgaggccacggcggcggtatccatcggcaccacgccggcctggacgacgcgcgccagggtgatttcctgcgccatcttggaatacgtgcccgacgcatcgatcaccgcgaacaccttgtagccgtcagccaccgcgctgatcgacgggaatgccatgcacacgctggtgatggtgccggcgatgatcagggtcttcttgccggtctcacgcaccgcggcgacgaagtcggggttgtcccaggcgttgatctcgcccttgcgcgcgacgtatttggcatggggggcgttttcgtggatttccgggatcagcgggccgttcgggccttgcggcacggatgccgtcgtgatcacgggcagcttgcacagcgtcgccatcttggccagcgcggccgcacgggcgcgcagctcaggcatcggcatgtcgccaacggtctggaacaggccactctggtggtcgatcagcagcatggccgtatcggcgggatccagtaccggacgcttgccgttgaaattcgcgggtgtggtcatttggctttctcctatgcggttggcgaaaccggcgactccgggcaatccccaagccgaccgtgtggccaaagcataggtcttggcaaatcgcatcgctaggatggaaaatctgccctcagcgtcctactggcaggacgacaggagccgcccgcttgcatcccgacctgaatgacctgtattacttcgcgcaggtagtcgatcaccagggctttgcgcccgccgggcgcgtgctcggcatacccaagtccaagctgagccggcgcgtggcgatgctggaagaacgcctgggcgtgcgcctgatccagcgctcgacgcggcgcttctccgtgacagaactggggcagacgtactacgcccattgcaaggccatgctggtggaggccgaagcggccgagagcgcgatcgagcaaacccgcgccgaacccagcggcctggtgcgcatgagctgcccggtggcgctgctgcacgcacgggtgggcgacatgattgcggatttcatggcggccaaccccaaggtcatcgtgcacctggaagccaccaaccggcgcgtggacgtggtggcggaggggatcgacctggccatccgcgtgcgcgtgccgccactcgaagacagcgacctggtgatgcgcgtgctggccgagcgcgcctggtgcttcgtggccagcccggcgctgctggccggccatgggccgctgctggcacccgcggacctcaacgtgctgccaacgctggacctggggccgccgcgcccctcgcacacctggtcgctatacggccccgatggcgccagcgccgagctgcaccacaagccccgcctggtcaccgacgacatgatcatgctgcgcaccgcggccgtggccggtgccggcatcgtgcagctgccggtcatgatgatgaccgaccagctgcgcgatggccggctggtaaaagtcctgccggactggtcggtcaggggcggcgtgatccacgccgtgttcccgtcacggcgcgggctgctgccttcggtgcgtgaactgatcgacttcctgtcgcagcgcttcgcgcagatcagcgaactctaggcatcgcaaggcggccgcgccaggggcactgcccgtcacgcgggcaggattggcccggaagtggtatcatccaggatcctatgcacggatcggcaacgcccgacctctgtgcgccagccgcaaacaatcccacaaaagcattagcggcggcttatcgggcgtacacccgatgcgtctttgggccagccgatgcagaacggcccaccaccctatccgaccagcggcacgtccgctccgcaacgatcgctcctgtacctggcgcatcggcctgcgcaggcatggtccacttcacgccagatgcaacgcctgcgcagccgcgcgggcccgacgctggcctacagcaacggcgaacggccgccaccgcgcgacgcctgcatcggaacgatgctccgcgcccctgcggccgtgcctcagaacaggcatcacattgaatcgagtcaaccctaccccttacaccgtttccgtctatcccatccagcaggaacccggcctctggttcgcgacctacatgattgcggaataccgcaatggcgccgaacgcatcgtcgccaacgtggcaatgcgccacgacacgcaccgctctgaagcccgcgccaggcagtccgcccgccgtgccggcgaacgcgccgcagcacgcctgcgccagcagtaagccaggcaccgtaagccccatcccatcggccagttggtgtccagttggccgtcacaacagctcgcgcacaagcggcgcggctacagcaaggagcctccttggcaaaagaagaactggtcgaattcggcggcaaggtgtcggaagtcctgcccgacaaccgtttccgcgtgatcctggaaaacggcttcgaagtctgggcgtattcgtccgggcggctgaagaagaaccgcatccgcgtgctggcgggcgaccgcgtcacgctggagatgtcgccctatgacctcaccaaggggcgcatcaactaccggcacaagtcgtaggccgtcgtcatggcatgcgccgcgccggcgcgtgccgtcccgctaacgattcatccctcaatcaaggagaaccgatcatgtccgtcatcgaagaatgggaagccgtgcacctgacgcccgaaggctggcaggcaggcagttaccggcatgcaccgtggcaggcggttgaagtcgcaccgcccgcttccggcgtgctgaccgtcaggcgccacgtaacggccacctattgcgggccgtcgcgcgcggttgaagaccgtactcccgagattaccgacatggcgctgatcgaagcgctgctggagcgccacggcgacccggtattccagatctgactgacctggcttgacgactgcgtgcggcctcagccaagcacgcgcacatgcggccgggccgtcctgagccccgcgccgaccggcctcagttcgccgtcccatggcgcggcggcgaggtccagcaccgcatcgccttcgcgcgccttgtcgtgcaactggtcgcgtaccacctggccaatggccaggcggcacagcacctcgccgctggcggcaagctggccctgcagggcccctggctcggccagcacgccgaacgaccgccgccccacacccacgaagctggtgaacagcaccccggtggggcgctccgcatcgataaagcagactgcaacgtgataggtgatgcctttgccctcaccgggcaacgtgcacagaaaaccagatgatcccgaacgcatgtccatgaacggactccttgcagtctgacggatagcgccgcgcctgtttccccgctccgcaacttggcctgtgaccaggccgcgctacggaaccggatacctagatcgacgtcacggattcgccggcgaccaggccattgatgatgtcttcgccgaactgcagcgcgccgcggcgcgccgagccgatgttctcccagcgcgactcgctcatggggtacacgcgcgcatggtcgctgccagggcgatagccctcgcggcaaatcacgatcgacgcgaggaagctgttgtcgggcttggtgcgcggccaggcctgctcaggccgatggcgataaaccaggggatacagatcgaaacccttgtagctggcaaagggcgtactgccgggaacagtgttgccgggactgcggctgggactgctgtcgctcacgacatctccatgcggcatcgtgccgcgctgatgggaaggattgctgaactcattggatcacgcgcacggcatgagccatggcccggcgcgggcgtcagcggcgcaaatgcaccacggcgccagggcccgtcgtcggagcttcaggatgccatcggcgcgccggccgctattaccgacacccccggcaccgcgccattgatgatggcctcggcatagcgcaacgcaccgcgtcgcgcgccaccgacgttatcccacggtgcggcgtccaggcggaacgtgcgcgcctgcatgccttctggcgactcgccttccaggcagatcaccacggcagcatcgaaggaacggtccggccgcggctcgggccacacgcgctcggcggcgtgcttgtacacaaggggatagaggtcgtagcccttgtaagttgcagccggatagatatccatggcagcctccgccgtttggtgatcctgcccccactctacgcttgttgccgcgccagcagtggctttatttcacggttgcggggaattgcggcaacggaaataaaaaagctccgcgttggcggagcttttttcattggactggcgcctcggcgctcagctcaactcaggtcggtgcgattcagatcggctcgatcttggtcgcggccgggcccttttggccgacgccagcgacgtaacgcaccttctggccttcttgcagcgacttgaagccgttgccctggatttcggagaagtgcgcgaacaggtcgttgccgcctgcatcaggcgtaatgaagccaaaacccttcgaatcgttgaaccacttgacggtaccggtttccatgttggattcctcaataagttttttctcaccggcaaaagcgccggcaaggcatgacgatcaaggaagacacaaggagaaaaagtggcgccgtgtgggcaagcacctggacttctaggttgctgcttgaaagatcctgcactcatccttatacaggccccacccaggcgtgtcaacgaacttcaccggatcgggcccaaatcacggggaaagtgcgggttgagggtctcgccgggcgaaatcctgtgtatgcggcatgtacccctcccacttccggccccgaaggcgccggcatgctacagtggccgatcgaacggaacagacacggatgacactctgcactgcctgccaggccattgaacgccacgtgcgcggcgcccccgggcacgcggcactgcgcatcaccgacacccgacgcatcaagcccgccggctccgccgccgtcaccatcagcagcttcgtctgccaggactgcggcgcgctctggacctaccgggaccagaagagcggcccggaacaggggtgggacatccatatggaagcgcagcagccataacgccttccgcggcgcaaagaaaaaccccgggccagggcccggggttgcgacacctgccggcccgccgagcgggccagtccggtcaggccgtcacggtcgacagcgcggcgttcagcgtctggctcgggcgcatcgcggcgctgagcttgtcggcttccggcatgtaatagccgccgatatccaccggctggccctgcacggcgccgagttcgccaacgatcttctgctcgttgtcggtcagcgtcctggccagcggcgcgaacttcgcggccagttcggcgtcctccgactggccggccagttcctgcgcccagtacatcgccaggtagaactggctgccgcggttgtccagctggccggtcttgggcgacgggctcttgttgttgtccagcagcttgccggtggcagcatccagcgtcctggccaggatcttggccttggcattgccggtcttgatgccaacgtcttccagcgacaccgccagcgccaggaactcgcccagcgaatcccagcgcaggtggttttcttccaccagttgcttgacatgcttcggagccgaaccgccggcgccggtctcatacatgccgccaccggccatcagcggaacgatcgacagcatcttggcgctggtgcccagttccatgatcgggaacaggtcggtcaggtagtcgcgcaggatgttgccggtcaccgagatggtgtccaggccgcggatcacgcgctccagcgtgtagcgcatggcgcgcacctgcgacatgatctggatgtccaggccgttggtatcgtagtccttcaggtaggtctcgaccttcttgatcagctcggcttcgtgcggacggtacgggtccagccagaacaccgccggcatgcccgagttgcgcgcgcgcgtcacggccagcttgacccagtcgcggatcggcgcgtccttgacctggcacatgcgccagatgtcgccctgctcgacgtcctgcgtcagcagcacttcaccagtggccaggtcgacgatgttggcgacgccgtcttcggcgatctcgaaggtcttgtcgtgcgagccgtattcttcggccttctgcgccatcaggcccacgttgggcacggtgcccatggtggtcgggtcgaagttgccgttggtcttgcagaagttgatgatctcctggtagatgcgggcaaaggtgctttccgggatcacggccttggtgtccttcggacggccgtcggcaccccacatcttgccgccgatgcggatcatggccggcatcgaggcatccacgatcacgtcgttgggcgcgtgcaggttggaaatgcccttggccgaatccaccatcgccagttccgggcgatgctcgtggcaggcgtgcaggtcgcggatgatctcttcgcgcttggagctgggcagcgcctcgatcttctcgtacaggttgaccaggccgttgttgacgttcacgcccagttcgtcgaacagcgcgccgtgcttggcgaaggcttccttgtagaagatcttgacggcgtggccgaacacgatcgggtgcgacaccttcatcatggtcgccttgacgtgcagcgacagcatcacgccggtcttgcgcgcgtcttcgaactgctcttcatagaagtcgcacagcgccttcttgctcatgaacatgctgtcgatgatctcgccatccagcagcgagaccttgggcttgagcacgatggtcttgccgctcttggtgaccagctccatcttgacgtcacgcgcgcggtccagggtcatggacttttcgccgtggtagaagtcgccatgcttcatgtgcgccacgtgcgtgcgcgaggccatgctccactcgcccatgctgtgcgggtgcttgcgcgcgaagttcttgaccgctgccggtgcgcggcggtcggagttgccttcgcgcaggaccgggttcacggccgagcccaggcacttggaatagcgcttctggattgccttttcttcgtcgttcttcggatcttccggatagtccggcaccttgtagcccttgccctgcagttcgcggatggcgctgaccagctggtgcaccgaggcgctgatgttcggcagcttgatgatgttggtgtccggcagctgggtcagcttgcccagctcggccaggttgtccggcacgcgctgcgcttcggtcaggaattcggggaactcgcccaggatacggcccgccaccgagatgtcgctggtggtgacgttgatgccggcgggcttggtgaaggtctggatgatcgggaggaacgcactggtcgccagcagcggagcttcgtcggtcagcgtgtagatgatggtgggttgctgggtactcattgcttctctcagatcctcgaacgggtggtaggacatccgcctgctgggtcacagcgcggcagcatactaggcgaaaaatagaattttgcctcagtttgctttcaggggcctgaaaacccactgctttttgcgcggctatcggcagaaatccggatgccggtgccgcgttgggcccgcccgcacagcatgatcgttcgcagattgcaccggcacggtgcccatatcgcatctacgctgcgacgcaacatgccggggccgtgcgccccacggatcacagttctgtcaaacttggcgccgacaatgcagggttttgtcctcttcaacgccaaggaaaaccacaatgtctcgtcatttgctgctggccccggcggccatcgcactgggctgcctgggcgcggcgcaggcgtgggcgcaggcccctgtcgcctaccccgccaggctggcaggccacgcggtgctgccggcccagaccctgcttgccgtgccgaaggacgcgcccgctgacctgcaggtcagcggtaagttcaccaccgcgcagcgcgtggacacgccgggcacggtcgaaggcaagtccaatggccgccccaccggcgtgtcgctgccgttccgcggccagccggcacaggggcattccggcatcaagcgcatggccgacggcagcttctgggtgctgaccgacaacggcgccggcgccaaggccaactcgccggacttcatgctgtacctgaaccactacaaggtggacttcggcagcggccgcctgcagcgcctgaagaccatcttcctgcacgacccggaccagaaggtgccgttccgcatcgtccacgagggcaccaggcagcgctacctgacggggtcggatttcgatacggagagcttccagttcgccgacggagcgatctggatcggcgacgagttcggcccgttcctgatcaaggcggacctggacggcaaggtgctggccgtgttcgacaccaaggtcgacggcaaggtggtgcgctcgcccgaccatcccgccgtcaccgcgcccggtgcgccagacggcagcgtgaagttccaggtgcggcgctccaagggcttcgagggcatggcgtcctcgcccgatggcagcaagctgtacgcgctgctggaaggcgcgctgtgggacgaggccgccaagggctacgagaacgaaggcggcaagccctacctgcgcgtgctggagtttgatgtcaggcagcaggcctggaccggccgccactggaagtacgtactggaaggcgccagccacgccatcggcgacttcaacatgttcaatgccaccaccggccttatcatcgagcgcgacaacggcgaaggcacgccggacaaggcctgtccggccgggcagaagcgcccggactgctttgacgatgtggcgaagttcaagcgcgtgtacaaggtcgagctgagcgatgccaacgccggcgggccgctgcgcaagatcggctatatcgacctgctgcgcattgccgacccggccaagcttgcgcgcaagccgttgaccgatggcgtgctggcgttcccgttcttcaccatcgagaacgtcgacgtggtcgacgccacgcatatcgtggtgggcaacgacaacaacctgcccttcagcagcagccgcgagccgaacaaggcggacgacaacgaactggtgttgctggaggtgggggagttcctgaaggcgcggtgagcgtctgctgtgatggggggtgctcccctctcccgcttgcgggagaggggagaaaacaaacaggctacgcttacgccgccagcctgaacgtcgacaccgcctccttcagccgctgcgcctgctcctccagcgagcctgctgcagcagcggcctcttccaccagcgccgcgttctgctgcgtcacggtatccatctgcgtcaccgcctggttgacctgctcgatcccggcgctctgctcggccgaggccgcgctgatctcgcccatgatgtcggtcacgcgcttgaccgcggcaacgatctccaccatggtctggccggcctgcgtcacctgcatggaacccttctcgacgcgatcgaccgaatcgccgatcagcgccttgatctccttggctgcggaagcgctgcgctgcgccagcgtgcgcacctcgcccgcgaccacggcgaagccgcggccctgttcgccggcgcgcgcggcttccaccgcggcattgagcgccaggatattggtctggaaagcgatgccttcaatcacggcgatgatgtcgaccaccttcctcgacgcgccgttgatctcctccatggtctcggcgaccttgcccgccgcgtcgccgcccttctcggcgatgtccgaggcattgaccgccagcgtgctggcctggcgcgcgttgtcggcgttctggcgcacgatgctggtcagctcttccatgctggccgcggtctgctgcagcgacgaggcctgttcttccgtgcgctgcgacaggtcggtgttgccggccgcgatctggctggtgccggacacgatcgactcggtgcccgcgcgcacctggcgcacgatgcgcaggatattggcgttcatgtccgccagtgcctgcagcagctgtccggtttcatcgcggctgtcgacgtcgatgcggctggtcaggtcgcccgacgccacggtgcgcgccaccgccacggcgcgatgcagcggccgcgtgatgcctgccgtcagccataccgagaacgcgatgccgatcgccagcaccaccacgccgagcccgatcaggctgttgcgggcgttgacgtagatgctgttgatctcgcgcgcggtggcgtcgatgctggcgcgctggatgtcgagcagcttctggatctcgcccaggtaggcgtcgccggccgggacgaactctttctccagcacctggttggcctcttcggtcagcccctcttgcttgagtttggtgatcttgtcgcggccgttgttgtacgggtcgcgcacgctcaggatcttctggaatgcggccttttcctcggccgagctgagcatgggctggagcttgtcgcgcaaggcggcgatgccttcgatcgacgccttggtctcggccgcgaagaacgcgccgagcgacgggtcggcactgcgcgccaccgccgtggtgcggcgcacgctggtgtgcatgaggcggtaccagtcgctgaccagccgctccttggtcagcggctgctgcatcatcgcgtgcgtgcgctcagccacctgttgcaggcgcatcatgccgaataccgtcatgagcgcagaaagcagcaataccaccccaaagccgatgccgaggcgtaccccgatgcctagattcttcatgtcttctacctgattagcactggttacggcgaagtgccggtccgcgcctgggaccggcgcggcgttcttcgctctcatcgtccgcggacgggcccggtcgggccgacgcacttgcgggctatggatgccaacggcatggggtccggaaactttagggtcttcctcgattgacggccggaagtgtgcggataccggctatagtggacaggaacccggccgaagggcacgctccatccccgccgccggccaccctgccagtccttccagaaggagacccagcatggccacgcctcccaatccctttgcagacttcaccaagatgatggaacagttccgcctgccgggcgtggacatgagcgcggtaatggaagcgcgccgcaaggacatcgaggccctgaccgaggccaacaagctggcctatgagggcatccaggccctggtgcagaagcagcaggagatcttcgcccagaccatgcagcagctgcaggcggccgctcagcagtacagcaccgcgggcaatcctgccgaggccatggccaagcacagcgaattcgtgcagcagcagctgcaccaggcactggagaacatgcgcgcgctggccgaaaccgcgcagaaggcgcaggccgaagcgctggccgtgatcagcaagcgcgccgagcagaatgtgaaggaggctggcgagttgctcaagccgaaatccaagggctagcccaggccaccgctagcgctgctcgggcgggaccggggcgatcgccccggcaaagcgggcatgcacctcgaggtccaccggccggtgcttgaccctggtgctggccgggttgttgccgaggtagttgccgttcttccagtcgcgtgccgggcgcaccggacgcggcacgaagccgcccccgcagttcgggcagacattgcggagcgtatccacgcagtctgcgcagaaggtgcattcgtacgagcagatacgggcttcggtcgatgcgggtggcaggggcttgttgcaatgctcgcagcccggtctgagttccagcatatcgcttgcggtgaacgattggggatcgacgctatcgtagccgcatttccgctgacggggctcgctcgttccagcgcaccaccgcagccggccccggcctgatgcccggcgccgccgagttgctgcgctaccaacgcaaggatttcgcggtggacctgcaggcggacgggtcggtggccgcggtcagcaacagccaggcctgtggcaaggccacgatggcttctacgaactggcccgctaccccgaggcccggcccttcggcgcatgggccaaggcgctcacgtttgaagaaatcgagcgggcggataccgtttccgggcgttatatcaaccatcctttcggcaacggaaatgaatgccgcgaccgtgtctctgggcatcgccggacgtcccaaggctcgatgctcccctacatcggcctgcgatagtgaagcctcgtcgcactggcttatcgctcccccttaccgcacccaccccctctccatcaacggcacatcccacggcggctcgccctgcagcctttccgccaggtagtccaccagcacccgcaccttcagcgcctgccgctgcgtggccggatacacggcggcgaactcgaacgatgacagcgcatagtcgtgcagcaccgggaccagccggccggccagcaggtcttcgctggcgaccagcgtgggcaggcaaaccacggcggctccgctgaccgcatagtcgcgcagcaggtggacggagttggtgcgcatgcgcggggccaggtcgatctcgaccgattcggcatcgcgcgagaaggtccacttgttgcgggtcgggtaggcggagtacagcgccaccttgctgcagatcaggtccgccggccgctccggcttgccccagcgttcaatgaactccggggccacgcagaagatccggcgcagtgtgaacaggcgccgcgcgatcagcgaatcgttctggggcgcgaagatctggaaggccacgtcgaagccttcctcgatcgggtcgatgacgcggtcgttgacgacgacgtccagttcgatatccggatactgctggctgaagccggccaggatatcggcgaagtggccaatggcgaagccgggcagcacctggatgcgcaggcgccccgccggggtggcgcgcaggtcgcgcatctggtcggtcaggtcggccaggttggcgaccacgtcggcacattgacggtagtaggtctcgcccacttccgacaggcgcacgtgccgcgtgctgcgatggaacagcggcgcgttgatgtacttctcgagctgctgcacgcggtggctgacgacggaattggtcacaccgagctggcgcgcggcctcggcaaagcttaacgtgtccgcgaccctgacaaaggcttcgatactgagaaaacggtccatggcaaacccgtgcgaagaggatcatgacccaccgcagtgctaccatctggccctcgccgggccagcaaggccgacaacgtgccgcggttgcttgcacaacggtggggcgcggcgacatcccggccgcgatcagaaggcagttcgacggcaatcatagcgaacgaggggcagatccgtcatgcagatccgtgcattgcatcgccgtcgcctggtgctgggcggcgccgcggccatgctgctggccggccgcaccggcgcacaagcgcgcagcaacggcccgctggtgctggtcgtgccgtttgcgccaggcggcgtggtcgacaagaccgcgcgcgcagtccatgttggcctcggacgccggctcggccagaccgtggtgatcgagaaccacgacggcgccggcggcaccatcggcacgggcatcgtggcgcgcagcaaggccaacggccacaccatcggcctggtctatgactcgtatgcgaccgagccgctggcctacccgaacctgccttaccgcgccgggcgtgatctcaccggcgtgtcgtatatggtgcgcgcgccaatggcgctggtggtgccggccgcgtcgccgtggcgcacgctgcaggactatgtgcgggcgtgccgacaatggcgcgaggtgtcttatgcctccgtgggtgtcggcagttccaaccacctgaccgccgaatggttccaccaggccgccggcacccatggcctgcacgtgccgttccgcggcggcgccccggcactgaaagacctgctgggcggccatgtcgattcgatgttcgccagcctgccgctggtgctggcgcaactgcaggccggcaagctgcgggcgctcgcggtcagctcttctgcgcgcaatccgcatctgccgacggtgcccacgctggccgacacctggccgggcctggtcacctattcctgggtcggcatgatcgcgccggccggcacgccggccgcgcagctcgaccgcctggccgccgcagtcagccagacgctgcgcgaagcggccgtcacgcagtacctgtacgacaatggctttgaagtcgtggccagcggacgcgaggcgatgaatgcactggtcgcttccgaagcggcgcgctgggcggaactggcgcggcaacgcacgctggcgctgagctagcgcgatgcctagtgcgcctgcggctcgtcccgtgcagcttccgcagccgggcgtgccgccgtcggcgccgacggtgcgccggtgatcttcggcacgcactcgccacggaaccaggccaccgtgaccgcctcgcccgccagcaggcgcttgacgggcggcaccacttgctcgccgatcagcatgcccagcaagccgatcagcgccaccaccggcggcgccggcgagcgcacctgcagcagtgcatagatgatgccgaccaggatgccggcggccagtgataccagatagagcttcattgcgttctccctgaaatgattggtggtgccgcgcgggcttcagcgcgcaaagtgcggcgcaatgccggcatccacgttgatccataccgagcgcgactcggtgtagccgtgcatcgcctcgaaccccatgtcgcgcccgtagccggattcacccacgccgccgaaggggctgcccggatggacgcgcttgtagcagttgacccagcacatgccgccgcggatatcgcgcgcgaggcggtgcgcgcgggccaggtcgcgcgtccatagcccgttgcccagcccgtattgcgtggcgttggcgatggccagcgcctgctcgtcgctggcaaagcgcagcaccgtgacgaccgggccgaagacctcctcctgggcgatgcggtcctgcgggcgcgcagcgaccacagtgggctcgacatagaagccctggcgcaggccggggtcggcaggggccttgcctccggccagcacggtgccgccctgggcctgtgccatctccacagactccagcacgcggtcgcggtgggcggccgaggtcagcggccccatctcggtggcagggtcggccggatcgcccacgcggatcgattgcgccagcgccacgaagcgctcgaggaaggcatcggcgatgtcctcatgcagcagcaggcgcgagccggcgatgcaggcctggccctggttgtggaagctggcccaggccgcgcccgccacggcggtatccaggtcggcatcggcaaagacgatattggcgcccttgccgcccaactctagctggatgcgcttgaggttgccgcgcgaggcctcgacgatgcgccggccggtggcagtggaccccgtgaaggcgatcttgtccacgtcgggatgattggccagccgctgcccggccacgttgccgaagccgggcacgacgttgatcacgcccggcgggaaaccgacgtcagccgccagcgccgccacgcgcagcgcggacagcggcgtcagctccgacggcttgagcaccaccgtattgcccgccgccagtgccggccccagcttccagccggtgaacatcagcgggaagttccacggcacgatctgccccaccacgccgaccggggtccgttgcacatagttgagaaaaccgggttcgaccggcaccacggtgccttcgatcttgtcggccatgcccgcgaagtaacggaagcacgcggcggtgcgcggtacgtcgaggccgcgcgcatcgcggatggggtggccggtgtcggcgctttcgagttcggccagacccgtgtcggcctcgatggcgtcggccagccgtgccagcagcctgccgcgttcgccggcggcgaggcgcgaccatgcgggaaaggcgcggcgtgccgcggccacggcgcggtcgatatcgagctgcgcgcccgcggtcacgcgcgtgatcaggctgccgtcgtgcggattgacgacgtcgagggtgtccccgtcaagggcgtcgacgaagcggccgtcgataaacagctggttgtgcatggggggtccttggggatgagggacgcgtaggtggcagggtggcggcattgcctgaagggcggtgtcggtgcgccacgcctgccctcacccctgccccgctcccgcaagcgggagaggggagttccgcagcggcagatcggaaggccgtcgctatggcttgcttattccagaggccgccccgctgccagcaggtgccgcacccgcggcggcccttcgccggtgtggaagcgcgcgacctcgcgctgcaggtctgcgtccgcgtgcggcacgcgctcgtgctggcgcaggtgctcggcccaggattcgaccaggaaccactcggtgtaggcctcggcatcggccgggtcctccatcacgccccagttgaacgcgccgtcgcgcagccgttcctcggacagcttgtggatggcttgcaggaagccttggcggtcggccgcgcgcacgcggtattcgatcaggatcatcaccgggccgcggtcgtgcgccacctcctcggcggcttcgggcgctggccagtgccgtgccgggcccaggtcttcctcgccacgcggcagcttgacgcggtgcatgacgaaggcggccacgcacagcgcggccgcggcgatcatcagcgccgccggagtgcccagcccctgcgcgacaaagccccacaccaggctgcccagcgccatggcgccgttgaacaccatctggtagaccgccagcgcgcggccgcgcacccagttgggcaggatcgcctgggccgtgccggccagcgtggtcagcgccaggatccacgcggcgccaagcagcagcagcgccagcatggcggcccatgccggcggcgccaccgacagcaccgccatcaccgcggcggtagccagtgccgcggccagcatcagctggtccaggtccagccgtttctgcaggcgcggcatcaccagcgcgcccaggatcgcacccacgccgaccgcgccaagcagcatgccgtacagcgatgcgccgccgtgcagcatctggcgcgccaccagcggcaacaaggcccagatgctgctgcccagcgcgaagtagcaggccgcgcgcagcagcaccacatggagcttgctgtgcgccctggcaaaacgcacgccggcgcggaaagcaccgaagaaatgctcgcgcagcgggtcttcggcgcgtgccgggcgcttccaccacagcagcgcggcaatcacgaacagatagctggccacgtccgcgccataggtcgccgccgcgccgaacgcggccagcaacaggccgcccgcggccggcccgatggcgcgcgcgatattgacgcccagcgagttcagcgccaccgccggcttcagttcaccggccggcaccagttccggcacgatcgactgccaggtcggccccatcatcgcggtgccgatgccgcccaggaaagccaggccgatcagcagctcgatggtcagcccgtcctgccatgccagcagcatcagcgaaccgctgaccattgccagccccacctggatcacgatcaggaagcggcggcggtcgaggatgtcagacagcacgccggcgggaatcgccagcaggaacaccggcagcgtgccggccgcctggatcatggcgaccgcggcgggcgagcccgacaggtcagtcgccagccaggcgctggccacatcgcgcatgaagctgccgatattgcccagcaccgtcgccgcccacagcacggcgaaggtgccatgcgccagcggcgcgaagctgccgccggccggcgcggcggcaccggggatcggcgcgggcttggcggccgggctcatgcctggcccctgcccgcgcggcgttgccgcaggtcttcccaggcgaccaggcaaaggccgccggccagcgcgatatgctcgaagaaggcgttggcctgcccgaagcgtgcatccggcggcgcctgccagaagcggttggcgacaaaggttgccaacaaggtgaagacggccagcgccagcgcgcccagccaccgcagccgcccgctcagcatcagcgcggccgcgcccagttccagcacgatcacggccgctgccagcggcgcggccggcgccaggccgaagtgctgcatctcggcgatggcggcaccgaagtcagccgccttgaccagtccaccctgcaggtagggcgcggacagtgccagcagcgccagccagcgcagccaggccgagggcgcgccgggcgtggtcgccgcgcgcgccgtggggcggatgggatgggcagtcatggtcgggtctcctggtatcggcaacgcagcggcatcagaacgcccagcatgagcaacccagcgcgccccagaacgtactctcgtccgaggtgggcacgccggccgtccaggccctggcatgcgcatggccgtgcacgccgcatgaactggcacagccgcaggctgtgttcaaggccagcttttgggcttgcgggcgcggctggtagccgcccgcgtggcgcaccggcgaccagtccggcatggccggcgggatggcgggcgacagcttgccgaagtcgccgtcgccatagaccacttcgccgccgaggatggtcagcaccgaggtgatgtcctggatctcgtcgcccggcacgctgaagtaatccgcggacagcaccgccaggtcggccagctggcccgccttgatctggcccttcttgccggtttcggacgagaaccaggtattggcctcggtccacagccgcagcgcggtctcgcggtcgagcaggttggcctgcgggtacatcgacatgccgcccacggtcttgccggtggtcagccagtacagcgacacccacgggttgtaagaggccacgcgcgtggcatcggtgccggcgccgaccttgacgcccttctccagcattttcttcaccggcggcgtcgcctcggccgcgcgtgcgccgtagcgctcgacaaagtactcgccctggtaggccatccggtgttgcaccgcgatgccgccgccgagtgcggcgatgcggtcgatattgcggtcggagatggtctcggcgtggtcgaagaaccagttcaggccgttgaacgggacgtccttggccaccttttcatagacatcgagcgcacgggagatggtctggtcgtaggtggcatgcagcctccacggccagcgcttctccgcgagcaggcggatcaccggctccaggtcggcctccatcgacggcgccatctcggggcgctcgacgcggaagtcctcgaagtcggcagcggtgtagaccagcatctcgccggcgccattgtggcggtagaggtcgtcgccctggccaggcttcaccctggaggcccaggtcttgaaatcgctgagctcttccttgggcttctgcgtgaacaggttgtaggccaggcgcaccgtgagctgcccggcctggtgcagttcctcgatgatgctgtagtcctccgggtagttctggtagccaccgccggcgtcgatcacgccggtgacacccagccggttgacctcgcgcatgaaatgccgcgtggagttcttctggtattcaggcggcagcttcgggcccttggccagcgtggcgtagaggatggtggcgttgggcctggccagcagcaggccggtgggattgccgcgcgcatcccgcgcgatctcgccgccgggcgggttcggggtgtccttgttgtagcccaccgcgcgcagcgcggcgccgttcaggatggcgcggtcgtacaggtgcaggatgaagaccggggtgtcgggcgccacggcattcagttcctcgatggtgggcagccgcttctcggcgaactggtgctcggtgaagccgcccaccacccgcacccattgcggcgctggcgtgcgcgcgacctgttccttcagcatgcgcatggcgtcggcgagcgagcgcacgccgtcccagcgcagctccatgttgtagttcaggccgccgcggatgatatgcatatggctgtcgatcagcccgggaatggcgcgccggccattcaggtcgaccaccttggtctgcgcgccggccagcttcatgatgtcctggcgcgtgccgacggcgacgaaacgcccgtcgcggatcgcaacggcgtccgcctgcggcctggacttgtcgagcgtggcgaacttgccgttgacgagaatgaggctgggctggctgccaggcggcatggcgaaggtctccgagagcggcgccgcgccgagcgcggcggccgaggcgataaattgccggcgggtgactgacatcgggctcaggccttcaggaaggccagcaggtcggcgttgacctggtcggcattgaccacgcacatgccgtgcgaagcgcccggatacaccttgagggtcgcgcccttgaccagttccaccgaccgcttcgccgcagcgtcgataggcacgatctggtcgtcatcgccatgcaggatcagcgtgggcacgtcgaacttcttcaggtcctcggtgtagtccacttccgagaattccctgatgcaggcgtactggcccacgatgccgccggccatgccctgcgcccagaaggcatcgatggtgccttgcgagaccttggcgccggggcggttgaagccgaagaacggcgtcgccaggtcctggtagaactgcgagcggttgtcggccacgcccttgcggatgccgtcgaacacatcgatcggcagcccgccggggttggccgcggtcttgagcatgatcggcggcaccgcgccgatcagcaccgccttggcgacacggccggtgccatggcggccgatgtagtgcgccacctcgccgccaccggtggaatgccccaccagcgtggcatcgcgcaggtccagcgcgtccagcagcgcggccaggtcgtcggcgtaggtgtccatgtcgttgccctgcgccggctggtccgatcgcccgtggccgcggcggtcatgggcgatcacccggaacccctgctgcaccaggaacagcatctgcgcgtcccacgcatcggcattgaggggccagccgtgggagaagaccacgggcttgccactgccccagtccttgtagaagatctgcgtgccgtcctgcgtcgtaatggtggtcatgatgggactcctggatgcaatcaagggatcgggtgagcttgcggctggttcagtgccggctcagcgggcaggcacggcggccagtgcctcatgcggcgtggcggtgcgctgcgcggccttgtggaccatggtgtaggcgtagtccacccccataccgtaggcgcccgagtgctccttgaccagtttcatcaccgcgtcatacgtgtcgcggtgggcccagtcgcgctgccattccagcagcacctgctgccacgtgaccggcaccacgccggcctggaccatgcgctgcatggcgtagtcgtgggcttccttcgaggtgccgccggaggcatcggccaccatgtagatctcatagtcgccttcggccatggcgcaaagggcaaagctgttgttgcagacctcggtccacaggccggacaccaccaccttcttgcgaccgttggccttgagggcgtcacgcaccttctggtcgtcccaggagttcatcgaggtgcgctccagcagcttgtggtccgggaacacatccagcagttccgggtaggtgaagcccgagaacgactccgtttccaccgtggtgatggtggtcgggatattgaagatcttcgccgccttggccaggccaacggtgttgttcttcagggcctggcggtccatcgactgcaccccgaaggccatctgcggctggtggtcgataaagatcagctggctgttttgcggggtcaggacttcgagcttggggttcgtcatgatgatctccggtcagggggcgcctggataggctgtgaagttagttattgctaccgctgtattcgttcaccagtggtgttcgcctggggtgtgtgcatagtaggcaaggcgccgtgcactgactacgtagcaaagtccgaggacagtgttcgcgatttgcgaataatcgggagatgcagtcgggcggcgggccgtggcgggaaatggcgagcgtgagggcgctgcccagcgctgcggggtgggtactgccagagggggactcggggcgagatgcgccaggcgggtacgtgcctgcacccgcctggcaacggccggcattgcgccggccggaacttcaggtcagatcacgccttgcgccagcatggcgtcggctaccttgacgaagccggcgatgttcgcgccttccacgtagttgatatagccatccgccttctgcccgtggtggatgcagttctggtggatgtccttcatgatcgcgtgcagcttctcgtcgacctcggcatggtgccaggacaggcgcatggcgttctgcgacatttccaggccggaagtggcaacgccgccggcattgctggccttgcccggggcgtagaggatcttcgcatcgacaaagcggtccacggcttccagcgtcgacggcatgttggcgccttcggccacgcagatcacgccattgccgagcagggtctcggcgtcgttgccgtccagctcgttctgggtggcgcacggcagcgccacgtcggcgggcacgtgccacggggtgcggccggcttcgaaggccatgccgtggcgggcggcaaagtcagacaggcggccgcgctcttcattcttgaaggccatcacttcggccagctgctcggtagtcatgccctgcgggtagtgcagcacgccgcctgaatcggacagcgtcagcaccgtggcgcccagctcgatcgccttctcggccgcgtactgggccacgttgcccgagcccgagatcagcacgcgcaggccgtcgaaagcgcgcccgcgccggtgcagcatctcctgcgcaaagtagaccgtgccgtagccggtcgcttccgggcgcatcaggctgccgccgtaggccaggcccttgccggtgaagacgcaggcggactggttggaaagcttcttcatcatgccggccataaagccgacttcacgtgcgcccacgccgatgtcgccggccgggatgtcggtatccgggcccaggtggcggaacagctcggtcaccagcgcctggcagaaacgcatcacttcgccatcggacttgcccttgggatcaaagtccgagccgcccttgccgccgcccatgggcagcgtggtcagcgcgttcttgaaggtctgctcgaagcccaggaacttcagcaccgacaggttcacagtcgggtggaagcgcatgccgcccttgaacgggccgatggccgagctgtgctgcacgcggaaggcgcggttgacctgcacccggttctggtcgtcggtccaggccacgcggaactggatcacgcgctcgggctccaccagccgctcgagcagggcctggtcggcgtagcgcggattgcgctcgacaaagggccagagcgtcatcatcacttccttcacggcctggaggaattcaggttgattggggtcgcggcgggcaacccccgccaggaatgcgtcaagggagggagaattcacggatgtctcttgctgtgctggagtggctggatccggcagccttgccggcttggtgccggtctgtggtgccgtctggcgttgcgccgatggaaggtgggtggcctccggttgtccgcacattcacggcggggccgtgcctgtcggacaatgcagcactttagcaccagcgtggggcacacgacagtcaaaacacctgtgacagcggcgtgaaagccgcattttagtgcatcaggcggggatttccgtgcgatcagcggacagcgccgcgccgcctttgggaatccgactggggcggacgctctgggccttcaggcgatgagcagcttggcgccccgctccttgagcgccgcggccagttccggctccggcgccatgtccgtaatcagccaggcagccaggtcgaaatgcttgatggtcacgccggtattgcggccgaacttggtatggtcagccaccacgcaggccacgtcggcggccagcagcatgcggctgcgcagttccgccgcggcgcgggagaagtcgcagatctcgccgcgcggcgtgacgccgccgatgccgacaaaggcaaagtcggtgtggtagcgcgacagctgttcgatggtgtcccagccgtgcgtggcgtcttcgttgtcctgcagctccccgcccagcacgatcacccggttgccgttgcgccggcccagcagctgggcgatggcaaggtcgttggtgtagaccagcaggttgtggtggccatgcagcgcctgcgccaccgcgtgggtggtggtgccgtagtccaggatcagcgaggcgccgtcgcgcaccagctcggcggcgcgcacgccgatcgcgcgcttgccttcggcattgaccgcggcgcgggtctgggtatcgggctcggtgcggtcagaagccagcgcgccgccgtgggtcagcaccagcaggccacgggcggccagcgcgttgaggtcgcgccggacggtctcgcgcgagacgtcgagctcggtcaccagttcgctgatagccagcgcgccggtggcggagagctggtcgaggatgtatttctgccgttgttcggcgagcacggtgactccggaagcgtcagggactgggggctgattctagcgcagcgggtgctgcggtgtgccaaggaccatgcccctctcccgcttgcgggagaggggccaaaccagcgacagattcatttcccccggtgcttcacgcccacggcaacgtcaccgtcttcaggttggtaaagctcttggccgcctcctgcacgccttccttatagcccagccccgaatccttgatgcccccaaacggcgtcagttcgatgcggtagcccggcacttcccaaagattgaccgtgcccacatgcagcgagttggcgattttggtgaaggcctcgatattgttggtgcacacgccggaagacagcccgaacgcggtcccgttggaaatccggatggcgtcatcgacatcgcggaaggtaatgatcggcgacaccggcccgaacgtctcctcgcgcaccaccgtcatcgacgggtccacgcggtcgatcacggtcggcgaatagctggcaccgttgcggtggttgcccaccagcaggcgcgcgccgtgcgctaccgcttcattgacgcgcgcctcgaacagcatcgcggcctgctcgtcgatcaccgtgcccatgtccacgccgcgatccatcgggtcgccgtatttccaagcgcgcgtcttctcgaccaccagttcggtaaagcgcgcggcgacggcctcatgcaccagcatgcgcttgaccgcggtgcagcgctggcccgagttcttgtaggagccctgcaccgccaggtccgaagcgcggtccaggtcggcatcgtccagcacgatcagcgggtcgttgccgcccagctccagcaccacgcgcttgtagccggccttgctggcaatgtacttgccgatcgccacgccgccggtaaaggtcaccaggtccacggcggggtgcgtgatcagctcgtcggcgatctcgcgcgggtcgccggtgatcacctgcagcatctgcggcggcaggccggcttcatacagcaggtcggccaggtagaacgccgacaacggcaccttctccgacggcttgagcaccatgcggttgttggtggcgatcgacggcgccaccttgtgcgccacctggttcatcgggtggttgaacggcgtgatggcgcagatcacgcccagcagcggctcgcgctgggtcatcacgcggcgcttcttgccgtgcggggtcaggtcgcacgagaacagctggccatcgtcgcgcagcgcctcggtggcggcaaagccaagcacgtcggcgacgcggccgatctcatacagcgaatccttcttggacaggccggattccagcgtgatcaggtccgacgcttcttcagtgcgctcacgcagcagcgcggcggcgcggttcaggatggcggcgcgctcatagcgcgtcagcgtggagcggtaggcctggcccacttcgaaggcacggcgcacatcgtcaagcgtggccttgggcacggtgccgaccagagtgccgtcatacgggttgcgcacttcgatcatgcgctcgcgcacgatcttctggccgtcgatgcgcagggcctcggcgcggaaatgggggctgacggcgccagcggggaattggggggcgttcataagtctcctccggtcaacacggttcggtacggctcgatgcactcagtgcagatggttcagcgcgacatcgaagatgtcgaagttgcgcagcagggccttgccggggataccggccgtggcgcggttgaataccagcggcacggtctgctccgacacgccaccgtgcgagcgcagcggcgcgtccagcccggacaggtcgtggcggctgtggctggtgcccagcaccacatgcttgtcgctggtcaccaccaggtcgccgacgcggtcgggcggcagttcaaagcgcgcgcaggcctcggcattggtcagcacgctttccacgccctgcaggtcggacagccgggccttgatcgcggccgggtccgcatcgtcgggcagatagatggtggcgtaggacccgagcgcaccgtggtggaccacgtagggatcggtgatcggcaggatcacgcgcgcgccgccgtcttccacgccgcggcccagccatgcgtccaggtggtcctgcaggtagatcacgttgggcgccttggtggcgtcgtcgtgcttggcgttcatgccgtgatcggcggtcagcgcgaccacgcagcccagttcgtccagccgcgccagatacttgtccatcatggcgtagaaagcgttggcgccgtccgagccgggtgcgaacttgtgctggatatagtcggtggtggacaggtacatcaggtccgggcggcgcgtttccatcaggcgcacgccggcggcgaagacgaactccgacaactccgcgctgtacacgtctggaaccggcatgccgaccagttcgaccacgccgtcgatgccgttctcttccaccgtggcctggtcggccttctccgacgagaagcagatgccctgcatgccgtggcccagcaggcggcgcagcttgtccttggcggtcaccacggcgacgctggccccggcatcggcaaacgcggccaggatggtgccggcgcgcaggtacttggggtcgttcatcatcacttcctcgccgcgcccgccgttggcgctgcggtcaaagaagtagttgccgcagatgccgtgcaccgccggcggcgcgccgcagacgatggacaggttgttggggttggtgaaggtgggcaccacgcaggcgccgcggaaggcggagccggcttccagcagccgcttcaggtagggcgcgcggccgctggcggcggcggcttccaggtagtcgaactcgcagccgtcgacgcagaccaccacgacgggctgctgcatccagcggtaggtgcgctggttgacggtaatggtgcgggcattggtgtcaggcatgttggggttcctgtgcttgggcgcgatcggggtcggtactttccatggatacggtcggattcaggcagcggcgcccttgtcggcgctggccgggtccaccgcggcatgcatgcgggcgcggccacgctccacgtgctcgcgcatcaggcgcgcggccagttcgccgtcgcgcgcggcaatcgccgagacgatggcgcggtgctcgcgggtggagtcgggcatggcggcgtggctgccggacagcgcttcgcgccggaacagcgtcagttccttgaccaggcgccggtaggtatccagcagcttgcggttgccggccagttcgaccatgcggtcgtggaactccaggttcagccgcgtgtattcatcgacatcgcgcgcctggctggcgacgcccagcgattccaccagcgcgcgcagttcgcgcaggccctcgggcgtgatgcgggcggccagctggcggccgatgaactcatccagcacggcgcgcagctcatagatctcatcggcttcttccaccgagatggcgcgcacgaacacgccgcggttcttctcggtgcgcagcaggccggcctgctccagcgcccggaaggcttcccgcaccggtccgcgcgacacattgagctgccctgccacctcgatctcattgagcttggcgccggggggcaggtcgcccgacatgatccgcagttccagttcgcgctgcaccagggtggccagggactggctctgcaggatggtgatttcgctcgccagcggtgcttggcgtgacatgaaaactcccgtttgtgagggattgcgcaatatcgaaaatccttattgccattaaagcaagcggtttgtatattgtcaacaatcaagacatcgatgtggcgcggatggtgacgcacggagcgcgaaaacccaggcatatgtcttgcaagtgttgtagcacaagggtttcacggtgattcaatgttgtgcagcacgccctatggcaatgcaacatattcaccaaattgacacatatctccacctacaatgccagaaggagtcccatgcaaccgtccttcacttccaccctgcgcaccgccgccgccctgcttgcgctagccgcctccggcacggcgctggcccagaagaccaccctcaccgtctacacggcgtgggagatcgagaccctcaagccgtacgccgagggctttgccaaggtggcgcccgatatcgaactgaagtacgtgcgcgactccaccggcgtcatcaccgccaaggcgctcgccgaaaaaggcaacccgcaggccgacgtgatcgccgggctggctgcgtcgagcctggaactgctcaagcaggaagggatgctggcgccctactcgcccaagggcttcgagaaactgacgcgcgactacagcgacaaggccacgccgccgtcctgggtggggctggacgtctggggcgccaccatctgcttcaacaccatcgaagccaagaagcgcaacctgccgcgccccgagacctggaaggacctggccaagcccgtctacaagggcaccatcgtgatgcccaacccggcctcttccggcaccggcttcctggacgtgaccgcctggctgcagctctatggcgagcaggatggctggaagtacatggatgcactgcacgagaacatcgcccagtacacccattcgggctccaagccatgcaagcaggccggctctggtgagttcccgatcggcatctcgttcgagctgcgcgcgcacaagacgctggcctcgggcgcgccgatcgagatgatcttccccaaggaaggcctgggctacgacatcgaggctgccggcatcgtcaagggcaccaagaaaatggaagccgcgcagcgctacatggactggctggccagcaaggaggccaaccagctgtttgccaaggactgggccatcgtcgcctatccgggcgtggcgaggaagatcgagaccatcccggccaactacgagcagatgctggtcaagaacgatttcagccatatcgccaagaaccgtgagcgcgtgctggccgagtggcagaagcgctatgccagcaagtcggagaagcagccctgagcgcctgagcgccgtcctgtaccggcgccctcgccccctggggcagaggacgccgggtcccccaacagaacccaccgggccccacgccatgcagacctccccatccacggccgagacctacctcagcctgaaaggcatccacaagcgcttcggcggcagcagcggcgccttcgtcgcactccacaatatcgacctggacgtgcgccagggcgagctgctgtgcttcctgggcccgtcgggctgcggcaagaccacgctgctgcgcatcatcgccggactggaatcgcagagcgccggcaccatccgccagggcgggcgcgacatctccacgctgccgccgatggagcgcgactacggcatcgtgttccagtcctacgcgctgttccccaacctgacggtggcggacaacgtggcctacggcctggtcaaccgccgcatgccgcgtgaccagcgccgcgcccgcgtggatgagctgctgacgctggtggggctgcccgagcgcggcaaccagtacccggcgcagctgtccggcggacagcagcagcgcgtggcgattgcgcgcgcgctggccacctcacccggcctgctgttgctggatgagccgctgtccgcgctcgatgcccgtgtgcgggtgcggctgcgcagcgagatccgcgcgctgcagcaacggctgaacatcaccaccatcctggtcacgcacgaccaggaagaggcattgtcgatggccgaccgcatcgtggtgatgaaccagggcgcgatcgagcaggtgggcacgccggcgcagatctaccagcgcccggccacgccgttcgccgcggacttcgtcggcaagaccaatatgctgggcgcgcgcgtctgcggcgacggcgagctgcacctgggcggcgtgcgcatgcgctgcgccgcgcccccgggctgttgcgccgacgaggacgtgcaggtgttcttccgccccgaagacgtatgcgtgcgcggaatcgaacagcatggccccaacgtgctggaggccaccgtggacaagatcgagttcctcggcgcgttctcgcggctgacgctgcgcctgcctgacgcagcgtccggcgccctgtacgcggacctctccctcaatgacctgcacgagctgcgcccgaacaccggcgacctgctgcgcctggccattcccgctgaccgtatccgcattttccgccacgcatgcgcatgagcctcactgcggcgccggccaatacgtctgccaccatgccggccaccgataccatccccgctcccgccaccagcgggccggccgggcctgccaaccctggcgcgcaacccgccccgccggccgtggtcgcaaccgccgtgcgcgcgcactggaccgaccgcctcgcccacgtgctgctggcgctggccgcgctggcgctcgcctgcttcgtgctggcgccgatcgtgatgatcctggccaagagcgtgcagaaccgcgacggcagcctggccggcatcgcgcacttccgcgcgtatttcgagtcgcccgcgctgctgcgctcggtgtggaacagcctgtgggtctctgccctggccacctgcatcaccctgccgctggcattcagctttgcctatgcgctgacgcgcagccgcatcgcctgcaagggcctgctgcgcaacctggcgctgatcccgctgctggcgccatcgctgctggcggcgatctccttcatcttctggttcggcaaccaggggctgttcaagccgtggatgggcagcacccagatctacgggccgctgggcatcgtggcctcgctggtgttcgccaccttcccgcatgcgctgatgatcctgatcaccgcgctgtcgctgaccgacgcgcggctgtacgaggcggccgatgcgctgggcacctcgaccgtgcgcaagttcttcaccatcaccgtgccgggcgcgcgctacggcctggtcagcgcggccatggtggtgttcacctatgcgatctcggacttcggcatccccaaggtgatcggcggcaatttccatatgctggccaccgacatctacaagctggtgatcggcatgcaggacttctcgcagggcgcggtggtgtcgctgatgctgctggtgccggtggccgtcacctactgtgtcgatgcgcgcgtgcagcgccgccagatggcgctgatgtcggcacgctcggtgccctacgtgccgcgccgcagccgccgcttcgacctggccatggcgatgttctgctggctgatggcggcgttgatgctggcggtgatgggcatggcgatctacgcgtccttcgtcaagctgtggccgtacaacttctcgctgtcgctgaaccactaccgggtggggctggtcgagggcggcgtggtcgattcctacctgaacagcctgcgcatggcgggactggccgcggtgatcgggccggtgttcatcttcgccaccgcctacctgctggagaagacccgcggcatggactggctgcgcagcttcgtgcggctgatggcggtgctgccgatgggcgtgcccgggctggtgctgggcctgggctacatcttcttcttcgtgccgcaggccaacccgatgcacgggctgtaccagacgctggggatcctggtgctggtgaccatcgtccactattacgcgtcctgccacctgacggcggtcaccgcgctcaagcagctcgacagcgagttcgaggccgtgtccgcatcgctcaaggtgccgttctacaagaccttcttcaaggtcacggtgccggcctgcctgccggccatcctggagatctcgcgctacctgttcatcaatgcgatgactacggtctccgcagtggtgttcctgtacggcgccgacaccaagctggcctcggtcgagatcgtcaacctggatgaatccggcgacatcggccccgcggcggcaatggcgacgctggtggtgctgacctcggccttcgcctgcctgctctattacctgctgcaacgcgtgctcgattgcaagacccaggcctggcgccagggcaacgactgacctttcccctgtttccactccttcccaatcaggagctcatcatgattcgcggcaacgacccgatccttctgacccccggtcccctgaccacctcgctcgccaccaagcaggccatgctgcgcgactggggctcgtgggacgccgccttcaacgccatcacgcgcagcctgtgcgacgacctggtgcgcatcgtccacggcgaaggcacccatgtgtgcgtgccgatgcagggcagcggcacgttctcggtggaggccgccatcgccaacgtggtgccgcgcgacggcaaggtgctggtgccgcagaacggcgcctattgccagcgcatcctcaagatctgcaaggtgcttggccgcgccagcgtggaactgccgatccccgaagaccagcccgccaccgccgcgctgatagaagaggccatccggcgcgacccgtcgatcacgcacgtggcgcaggtgcactgcgagaccggcgccggcgtgctcaacccgctgcaggaaatcgccgcgctgtgccagcggctgggcaaggggctgatcgtcgacgcgatgagctcgttcggcgcgatcgagatcgacgcccgcaccatgccgttcgacgcgctggtggccgccaccggcaagtgcatcgagggcgtgccgggcatgggcttcgtgctggtgaagaaagacgtgctggaagccagccagggcaacagccactcgctggcgctggacctgtacgaccagtacgtctacatgcagaagaccacgcagtggcgcttcacgccgcccacgcacgtggtggcggcgttccgcaccgcgctcgaccagttcctggaagaaggcggccagccggtgcgcggcgcgcgctaccgcaggaactgcgacgcgctggtgcagggcatggccgcactcggcttccgcgccttcctgccggcggcggtgcaggcgccgatcatcgtcaccttccatgcgccggccgacgcgcgctatgacttcaagaccttctacgccagggtgcgcgagcgcggctacatcctgtatccgggcaagctgacgcagatggagaccttccgcgtcgggtgcattggtgcgatcgacgacaacgagatgcgcaatgtggtgacggcgattggcgaggtgctgcgcgagatggggatcaagatgcaggcgccgctggcagaagcggcttgaccccttgagcatcttcacctcactcgcctagcagcaggctcccctctcccgcgagcgggagaggggagcaaaccatcggttcgcaaactcaacccttcatgcccctccccccagactttcacggcctcgcctttgccgccgtgatgctgtccgcgctgatgcacgcgtcgtggaacgccatcgtcaagatcggcggcgaccgcttgtcgtcgatggctctgatcgacaccttctgcctgctggtggccttgcccttcctgttcctggtgcccctgcccgcgccgcaggtgtggcccttcctgctggccacagtggcgctggaagtcggctacaagctgtcgctggtggctgcctacaaccgtggtgacttcagccaggcctatccgctgatgcgcggctcggcgccgatgatggtggcgatcctgctgctgctggccggcagcgaacggctggggccaggcggctatgccggcatcgcgctgatctgctgcgggctggtcagcctggtgcgctggcgccggcaatcgcccgacctgctcggctttgcgctgctggccggggcctgcctggcggccggcaccgtgatcgacggcaccgcggtcaagcgctacggcgaggtcttcacctacatcgtctggctgcaggcgatgtcgcacatcttcatgccgacctacgccttcagccggcgcggcaacgcgctggtcacgctgatgcgcacggaatggaagcgcgcgtggatcggcggcatcaaccgggtgggctcgtatgcgctgatgctgtgggcgatgaccatggcgcccgtgaccaagctggctgcgctgcgtgaatcgagcgtgatctttgccgcgctgctgggccacttcctgctgcgcgagcccttcgaccggcggcggctgattgcgaccgcgctggtcctggcggggatcctgacactgcaactggcgcgctgatccgtcgacgtatgttgcattttgtgttgtttgttggcgtttttttgcataacatggcaggcaacgccaaaccctttcctgccgaggttttcccgccatgtcccctgtcatcccatcccactcccgcgtcgtcatcatcggcggcggcatcatcggttgcagcgtcgcctatcacctgaccaagctcggctggaaggatgtggtcctgctggaacagggacaactgtcctgcggcaccacctggcacgcggccgggctggtcgggcaactgcgctcgcaggaaagcatgacgaaactgatccgctactccacccagctgtacagcgaactggaagcggaaacgggcctcggcaccggctggaagcaatgcggctcgctgtcggtcgcgcgcaccgcggaacgcatgacgcaactgcgccgcaccgcggcggtggcgcgggcctatggcgtggattgcgaggtgatctcgcccgcccaggccggcgaactatggccggtgatgcgcactgacgacctgcttggggcggtctggctgccgggcgacggcaaggccaacccgactgacctgacccaggcgctggcgcgcggcgcgcgcagccgcggtgcggtcatcgcgcaggatacgaagatcaccgcgatccatacccgcgatggccgcgccaccggcgtgagctggcgcaacaaggccggcgacgaaggccgcatcgaggcggagatcgtcgtcaactgcgccggccagtgggcgcgccaggtcgggcagatgtgcggcgtgaccgtgccgctgcactcggccgagcactattacatcgtcaccgagcgcattgccggcgtgcatcctgacctgccggtgatgcgcgacccggacggcttcatctacttcaaggaagaagtgggcgggctggtgatgggcggcttcgagcccaatgccaagccgtggggcatgcagggcattcctgagccgttcgagttccagttgctgcctgatgactgggatcagttcgagatcctgatggagaacgcgctgatccgcgttccggcactggagtcggcgcaggtcaagcagttctacaatgggcccgagtccttcacgccggacaacaacttcatcctcggcgaagcgcccgagctgcgcaatttctacgtgggcgcgggcttcaactcaatggggatcgcgtctgccggcggcgccggcatggcactggcggaatggatcgtcgcgggcgacccgaccatggacctgtggccggtcgatatccgccgctttgccggcttcaacggcaaccaaagctggctgcacgaccgcgtcagggaaacgctgggcctgcactacgcgatgccctggcccaaccgggaactggatacggcgcggccgttccggcgctcgccgctctatgcccacctgcacgctgccggcgccaatttcggcagcaagatgggctgggagcggccaaacttcttcgcgcctgccggacaatcgcccgagatccgctactcgttcgggcaacagaactggctgccgtggagcggcgcggaacaccgcgcctgccgcgaggcggtggcgctgttcgacatgagttcgttctccaagtacatcgtcaagggtgccgatgccgaggccgtgctgcaatacgtgatgagcaacgacgtggccgtgccgccggggcagaccgtgtacaccgccatgctcaacgatcgcggcacctatgaatccgacctgaccgtgacgcggctggcgcacgaccagtacctgctggtgaccggctcggcgcagaccacgcgcgacttcaactatatcgagcgcctgattccggccgacaagcgctgcgcgattgtcgatgtcaccgggcagtacgccgtgctggcggtgatgggcccgcgctcgcgcgagctgctgcagagcgtgtcgcgcaccgatttttccaatcaggcgttcccgttcggcacctcgaaagagatcgatctcggctatgccacggtgcgcgccacacgcctgacctatgtgggcgaactgggctgggagctgtatgtcccggtggaattcgccgtgggcgtccatgacactttgcacgaggccgggaaacgcttcggactggtcaacgccggctactacgccatcgaatcgctgcgtatagagaagggctaccgcgcctggagccgcgaactgaccaccgacatccatccgttcgaggccgggctgtcgtttgcctgcaagctgaacacggacatcccgttccgcgggcgcgaagcgctgctcaagctgcgcgctgccggcggtgccgcgcaggtgcggcggcgcgttgccgtggtcacgctggacggcgccagcgaggccatgctctggggcggcgaggcgatcctgcgcaccgccccggacggcaccgtgcgcccggccggcttcgtcacgtcggccgcgttcggccacacccttggctgtccagtgggcatgggcttgctggcacgcgccgatggtccggccgacgcggcatggatcgagggcggcaagtatcacgtagacctggccggggaactgctgcccgcgcgcatccacctgcgcgcgccgtacgatccggccagcgagcggaccaaggcctgaacctcgatgcaagcggataccggagtgcccatgccagtgatccagaccgaaaccgccagctacatcctgacgctgtcatgccccgaccgtcccggcattgtccatgccgtttcagcgctgctggtggaagccggcgccaatatcgtcgattccgcgcagttcggcgatcgcgacagcgcacggtttttcatgcgcgtgcacttccagcggccgctgcccgaaggccaggatgccggcgatgcgctcgctgccctgcgcagcacgctggcaggcgtggcggccgcgcatgagatggactggtccctccacgacgccgcgcgcaagccgcgcgtgatgctgatggtgtcaaggatcggccactgcctgaacgacctgctgttccgctaccgcaccggccagctgcccatcgagattccggccatcgtctccaaccacaaggacttctaccagcttgcggcgagctacgacatcccgttccatcacctgcccctgctcaatgccacgccgcaaggcaaggccgcgcaagaagcgcggctgtgggacctggtctgcgactacagcatcgacctggtcgtcctggcccgttacatgcaggtcttgtccgacgacctgtgccgccgcctggagggccgcgccatcaacatccatcattccttcctgcccagcttcaagggcgcgcgcccgtacgcgcaagcctatgagcgcggcgtcaagctgatcggcgccacagcgcactacgtgaccggcgacctcgacgaaggccccatcatcgaacaggaagtcgcgcgcgtggaccatgccatggacgccgcacagctgaccgccatcggacgcgacgtggaatgcgtggcgctggcgcgtgcggtgaaatggcatgcggaacatcgggtcctgcgcaacggcggcaggaccctggtgttccgctgacgcggcagcctttgccgcagcttcagccggccaccgcccgccggaccttgcgcaacgcctgctccagcgcatccatggaaatcgacccgagcgccagccgcagcgcatgcggcacgctcgcgccgaccgcgaacggctcggccgtcgtcaccagcacaccctcgtgctccagggcggccacgacctggtcggcgcgcaggtcctcctcgagttcgagccacaggtagtatgaagacgggtgcgccgtgacgcggcagccgcgcaggatgcgccgcgccaggctctgcctgcgccgggcatccttgcgcttgcgatcttccaggtcatcgacgatgccggcttcgatccagaggcagccgagcgccacggtcagcgacggcgtgttccaggttgacacgcgaatggcgcgttccagggccggcaccagcggcgcgggcgccgcgacaaaccccatcctcagtcccgatgccacgctcttcgacaggcccgagacgtagacggtccgctctggcgcgaaggtgaacaccggtttcggcgccggttcggcaaggaaggcgtaggcgccatcttcaatgatcagcagatcatgccgttgcgccagggccgcaaggcgaccgcggtccgcctcgctcatgacatagcccagcggattgtgcatggtcggcatggtgtagaccgcccgcaccggacgccgcttgcagagcgcggcaaggcgatccaggtccaggcccgcggcggtcaccggcaacggctccaggtcgagccgatacaactgcgccagcgccttcatgcccgggtacgtcagcgcgtcaaccgccaagacgtcgccgggattgagcagccccatcaccgtcaccgccaggccctgctgcgcgccgttgacgatcagcacctggctgcccggcacccggacaccgcggttgcgcaggtgccgggcgacggcctgccgttcgtgcgggcgcccgccctgcggcgcggaatgcagcaacgcgtcaaggtcgcccgaagccgcgatgctgcgcaagccatcgcgcaacagttcaacctgcccgggcagcgacggatagttgaaagtcaggtccaccgcgccggcgcgcaccggatgctgctccagccccaggccacgcggcagcgaggtatcgcgcacgaacgtgccccggccggtctcgccgaccaccaggccgacggcctccagctcgacgtagacgcgtgccgcggtcgccagcgccacgccgtactgcttcatcagcgcacgcaccgtcggcagttgcgtgcccggaggcagttcgccgcgatgaatgcgcgcggcaatctcgtcaacaatggttttgtagcgcgcgtgggccatgctttgtatctagaacaatgctttgcgtgtatcaggccagaagaatagcctgcatgcctagtcaacgctaaccatttcctgcacatgattgccctgaccaccctgtcggtcttcgcggcggcagtgatgctgctgctcctgtcacccggcccgaacatggccttcgtgatggcacatggcatcacctatggccttcggggcggcgttgcgacggcactggggattgccgtggccgacctgatcctcacggtcctgacagccaccggcatcaccgccctggtgatggcgtgggcgccggcgttcgacctgatccgctatgccggcgcggcctatctgctgtggatggcggtcaaggcgctgcggcagccgcttgcgctgaaagaggcagtggtgacgcaggcgtcgttgcgctcggtgttcgtgcgcgccatgctcaacagcctgctcaatcccaaggcgctgctgttcttcatggtcttcctgccgcagttcgtggatcccggcaagggcggcgtggcccggcagctgctcgtgcttggcctggtcctgacggtgatcgccaccgtgtttcacgcattgctcggcgcggctggcggcaccgtgcgccgcttcctgtcacgccatcccaaggcggcaacactgcagtcgcgcggcctggcagccgtgctggtgctgctggcgctgcgggtggtgctgacctcacgcccggcctgaacccgtttcccacgcagagcccctgatgtatatcgcagcctttatttaccggcccggccaggccgatgacgagttccaccgccttagcgccctgatcgacgagatcgccgccggcatacccggctttgtcggtgccgagtcctggcgctcgccagatggccagttgtccaacgccagctactactggcgcgacaaggactccctgcaggccttcgccacccacccgcggcacctggacgccaagcgccagtaccgcaagtggtatgacggctatcacgtggtgatatccgaagtgcagcgcgcctatggcgacggttcgctccggcacttcgtgcccgacagccggcgccagcggcaggggtaagccctgccccgggtgttccattctggaacacccggtgtcacgcgctggcacagccgtgccggcgcgtgacatctcccacccgtgccacgcgcacgcgccccccgcttttccccgttttttcgttcgattcacgccccggcacagctcttgcgatctgcctgccgtgcgcacggccggaatgccgtgacgacaccacagaaatctctgaacggagcgagacatgaacatggcggaaatcgcccagctgggcgtcagcaacccctacaagcagcagtacgagaactacatcggcggcgcctgggtgccgcccgccggcggcgagtacttcgaatcgaccacgccgatcaccggcaagccgttcacgcgcgtgccgcgctccggccagcaggatgtcgacgccgcgctggacgccgcgcacgccgccaaggccgcgtgggctcgcacctcgaccaccgagcgcgccaatatcctgaaccgcatcgccgaccgcatcgaggccaacctgaagctgctggccgtggccgagagcatcgacaacggcaagccggtgcgtgaaaccaccgccgccgacctgccgctggcggtcgaccacttccgctacttcgccggctgcatccgtgcgcaggaaggcggcatctccgagatcgacgccgacaccattgcctaccatttccatgagccgctgggcgtggtcggccagatcatcccgtggaacttcccgctgctgatggccacctggaagctggcgccggcgctggccgccggcaactgcgtggtgctcaagcccgcggagcagacgccggcctcgatcctggtgctgatggaagtgatcggcgacctgctgccgccgggcgtggtcaacgtgatcaacggcttcggcctggaagccggcaagccgctggcatcgagcccgcgcatcagcaaggtcgccttcaccggcgagaccaccaccggccggctgatcatgcagtacgcgtcgcagaacctgatcccggtgacgctggagctgggcggcaagtcgcccaacatcttcttcgaggatgtgctggctgccgacgacgccttcttcgacaaggcgctggaaggctttgccatgttcgcgctgaaccagggcgaggtctgcacctgcccgtcgcgcgcgctgatccaggaatcgatctacgaccgcttcatggagcgcgcgctcaagcgcgtggccgctatccgccagggccatccgctcgacaccggcaccatgatcggcgcgcaggcgtccgccgaacagctggagaagatcctgtcgtacatcgacctgggccgcaaggaaggcgcacagtgcctcaccggcggcgagcgcaacgtgctggacggcgacctcgcgggcggctactacgtcaagccgaccgtgttcgccggccacaacaagatgcgcatcttccaggaagagatcttcgggccggtggtatcggtgaccaccttcaaggatgaggaagaagcgctggccatcgccaacgacacgctctacgggctcggtgcgggtgtctggacacgtgacggcgcgcgcgcattccgcatgggccgcggcatccaggcggggcgcgtgtggaccaactgctaccacgcctaccccgcgcatgcggcattcgggggctacaagcagtccggcatcggccgcgagaaccatcgcatgatgctcgaccactaccagcagaccaagaacctgctggtgagctacagccccaacgcgctcgggttcttctgaccatggcgggcccgatgtccgctcccgccaccgcgccggtcgcacgcgtggtggcaaccccggccgcgctcgcgctgatcgcggagctggccgcgcggcatggcccgctgatgttccaccagtccggcggctgctgcgacggcagcgcgccgatgtgctaccccgccggcgaactgctggtggggcaggccgatgtctgcctgggcgagatcggcggcgcgcagttctacatgacgcgggcgcagttcgagtactggcagcacacgcggctggtgatcgatgtggtgccgggggcgggcgggatgttctcgctggagggacggacggggaagcggttcctgacccggtcggagttgttcagcgatgaagaggccgcgtggctcgcggcgcagccggggttgtgaggatgattgcttgctgatgtcggtagttgcttgccgacggagtgctccctctcccgcaagcgggagagggagcaaacaagcgggatcggaaggccttcagcgctccgcttcctcgtcgccctccaacccctccctcaacctccgatagatcgtattgcgcgacacccccagctcacgcgccgcgtggctgacattgccgccgtgcctggcgagcgcctgccggatcaggcctgcttcccagtcgcgcatgcgggcggattttgatggcgccggcgcctgcacggcagccgccgcgtcacagcgctccgcctcatcgccgcactcctgctcaaacccttccggcaggtgctccaccccgatctgcgcctccccttccgccaggatcgccgcggtgcgcagcacgttggcaagctgccggatattgcccggccacgggtgccggcgcagcagcgccagcacctgcgcgtcgacatgcaccggggacggcaggccggcttcttcgcactgccgctgcaggatgcgatcgaccagcagcggcaggtcgctgcgctcgcatagcggcggcagggtcacggccagcgcattgatgcggtagtacaggtcttcgcggaaagcgccatcggcaatcatcgcgcgcaggtcgcggtgggtggcacagaccacgcgcacatcgaccggcagcgcgcgggcgctgcccagcggggtgaccgcgcgctcctgcagcacgcgcatcagccgcacctgctgtgccagcggcatgtcgccgatctcgtccaggaacagcgtgccgccgtgcgcctgcacgaccttgccctcgctcccgcggcgacgcgcgccggtgaaggcgccttcttcatagccgaacagttcggcctcgatcagcgattcggggatggccgcgcagttgaccgcgacgaaaggcccgccggcgcgcggcgaggcggcgtggatggcgcgcgccagccactccttgccggtgccggtgcggccctggaccaggatggtgatatcgcgcccgctgaccttgcgcacgcggcgcagcaccgcggccaccgctgcgtcgccggtatcgagcgcggccagtgccggcggcagcgggtcttcggcgccgggctggcgcaccgcgatgggcgcggccaggtattcgatgcgggcaaacacctgcacccggctgggcagcgtcagcgtctgcagcgatcccgccgcgccaccgcgcgcttgcatcgccgcgcgcaccggctggccgaacagcccggcaaaaccggcgtccgccagcgcgtgcggggccagccccagctggaacaggccgctgcggttggcagccaggaaggcgccgtcgggcgagaacgccgccacgccctcgaacagcgtgccgacgaactcgggccgcgcatggaagcgcaccagcagcgcgtccgggaagtggttggcaaacaggtggttctcgatcatctgcgccgacatccgcaccagcgccatggtgtgccggtggaagccgcgatgatcgccgctgacatcgagcgcgcccaggatggcaccggtcgggctggcgatcggcgcgcaggagcaggtcagctggtggttggactcgaggaaatgctcgctggcatggatcagggtgggacgggcctcggccagtgcggtgccgatggcattggtgcccttgctcggctccgaccacgatacccccggtgccagcgccacgcgccgcgcccgcgcgacgaattcgccgtcgcccaggctgtgcaggatcacgccgctgctgtcggtcagcagcaccatgctgtcggtattggcgatctgcgcgtgcagggtctccatcaccggcaaggcatggcggtacaagtcgcggctggcgtccaccagctcacccagcgcgcgcgggctgacggcatcgaagccgggcgcatggcgcacatccagcccgaagccggccgaacgcgcatgcgcgcgggcgatcaggccagcgcggtcggcatcggccgggtcgacatgggcagcctggcgggcaacatcggaaggcgcagcgggatgggcggcacggtgcatggcggcgggtctcctgtatcagcaggcggcgcgcgtcgcggccgctgcctgccgtcccgtggcgcgtgccgtgcagctcaggtgcggcggcaggccgggcggctgtagtccggcaaccttatcacaggctcccggccatgtattgcccccgcgccatgccgggccggggtcagcgtttttcgtcgagcaggtcgttcaggatttcgtcgaaggtggcctgggcatcttccagcgcctgcagcgccgcatcgaacgtctgcagcgcaagcttggaaggcttgccgctgccctgcggcggatagtgggcctgcaaggcggtgaaggccacctgcacctgccgcgtggccgcgaccacgcgttccatggcctgcgcctcttcggcgcggtattgctcgtgtttctgctcgctcatgcccgtttgctccgtatgcgcgccgtctcgggagggggtgcgcgcgcgtgaatgaggtatatcgtacaagaactgcgccgggcggcttgcgctgcgcgctcgcgcctgacaaaaatgaggtaggctgcgcggctgggcggcaaggccggcgctggtgcgccccgcctggcagcgacactgaagactagccatgccattgatcacccgccgtacgctggcagccgcgctgatgactgccagcggcttcgcctgctactggacctacctgacgctcaaccaggaacggctgctgttcgatgcacgccggcgtccgccgcgcgacctgcccgacggcatcattggctactcgcacctgatccccggcggcgtggtgcgcggctacatctaccatagccccggcgacaacgtgcgcgacctgctgttctacctgcccgggcgtggcgaggatgtgctcgaaacgctgcagtacgcgcgctggctgcccgccggcatggccttcgccacctatgactaccgcggcctgggacactccgacggcctgccgtccgagggcgccgcagtggccgacgccagccagttcctgctgcatgcgcggcgtgtcttccccgacacccgggtgcatgtggtgggccgcagcctgggcaccggcgtcgcgatccagctggcggatctgcaggacttcgacagcctgcagctgatcacgccctacgactcgctgcttgaactggtgcgcaagcgcttcccgctggtgccgctgcgccagctgatgcgccaccatttcgattcgatctcgcattgcaagaaggtcgtgcagagcaccaaggtgctgctggccgagaccgatgaagtggtgccgcatgaatgctcggaacggctcatggctgcctggcccggcccggtggcgttgcagaccgtgccagccacgaatcacttcaccattatcgaacgcgaggaaacctggctggcgctgtgcgaatttgcccggcatcacggccaggccaggctgcgcgtggctacagcccagcccgcaccgccggccgccaccggcacgccgcccatcgaccatgacgagctcggcaacccgctgccgctggcggccggccgctagcgccagtcaggcagcgggtaaaatgcgcgcatgaaaaaaatcgcagtcaaggcaggcggcgccgtactggcgctggctgcagccggtgccttgcttgccggctttgccgcggtggtaagcctgcggcagcttcccgcagtcgactccctgcgcgactaccggcccgacgtgcccctgcggatctacaccagcgacaatgtgcagatcggcgagttcggcagcgagcaccgcgagttcatccccttcgggcagatgccgtcgcgcatggtccaggcgctgctggctgccgaggacgaccagttctacgagcacgagggtgtcgacatgcccggcgtgctgcgcgccgcgctggccaacctgggccagggctatgcgcagggcgcgtccaccatcaccatgcaggtggcgcgcaatttctacctgtcgcgcgagaagacgctggcgcgcaagtggtatgaaatgctgctggcctggcgcatcgaccagaccctgcccaaggaccgcatccttgagctgtacatgaaccaggtctacctgggcgagcatgcctacggcttcggcagcgccgcgcatgcgtacttcggcaagccgctggcgtcgttgtcgctggccgaggcggcgatgctggcggggctgcccaaggccccttcgtccatcaacccggtggtcaacttcccgcgcgccaagcggcgccaggaatatgtgctgggccgcatgctggcactgggcatgatcagccaggacgactaccgcgaggcccgcgccgcgcgcctggcaatctccgacgacagccccggcagctttgccgggcatgccgagtacgtggccgaactcgcgcgccagctggcgcgcgagcgctttggcgacgaggcctacacgcgcggcctgaacgtctacaccacggtgtcgtcggtgcgccagaccctggcttacgatgcggtgcacggcgggctggaaggctacgcgcggcgccaccgcaagttcgtcaaggacctgtcgcagggcccgcagggtgcgctggtatcgctggacagcgccaccggcgcgatcgaggcgatggtgggcggcgccgactttgccaccagccgcttcaaccacgccacccaggcgcagcgccagccgggctcgaccttcaagcccttcgtctatgcggcggcactggagcgcggcgtgtcgcccggcacgctgatcaacgacgcgccgctgcccaatggttcgcgctggcagccgtccaatgacgacgggcgctttgtcggctccatcaccgtgcgccaggcgctggcggaatcgcgcaacctgccggcgatccgcacgctgcaggcgatcggcatcccgtacacggtggagttcgccagccgtttcggcttcgcgcccaggcggctgccgcgctacctgccgctggcactgggcaccggcaccacttcgccgctgcgcctggccgcggcctatggcgtctttgccaacggcggccaccgcatcgagccctacctgatcgcgcgcatcaccgacagcgaaggcaaggtgctgttctctgccgagtcggaggacgccgcggacagcccggccccgccgcgcgtgatcagcgcccgcaacgccttcgtcatggacagcctgctgcgcagcgtggtcgacgacggcaccggcgccggcgtgcgccgctacctgcgccgcgccgacgtggccggcaagaccggcaccaccaatgactcggtcgacggctggttcgcgggctacgccggcggcgtcgtcacggtggcgtggatgggctacgacgacaaccgcagcctgggcgagcatgagttcggcgccaccaccgcgctgccggtgtgggccgcctatatggagggccgccttgcgggcgtgcccgtgcctgaagctgaagcgcccgccggcgtggtccgcgtgggagatgactggatgtacgcggagtatgccgatggcagccacggcatcgccgccatcggcttcccgccgccggcacccgcggcggcgccggcggtcgatccggtcgccagcaacctcggcgggaccgcggcgccggccccggctgcccccgcgccgacacctgtcaccagcgagacaactggcctgccggcgcccggcgctgccacgccggccgtccccgcggacgccaggctgtagacttccggctttccactgtccccgatcccgatgtccagccacgccccgctgctgatctggtcggtcgccgcgctgaccacggccggcgtcctgttccgcccgttccgcctgcccgaagccttctgggccgccgccggcgccctgctgctgtgcgtcaccggcctgatgacgctgcccgacgcgctggcggcggtgctgcgcggctacgacgtgtacctgtttctcgcgggcatgatgctgatctccgagctggcccgcaagaccgggctgttcgaccacgtcgccgcgctcgccgtgcgccgggcgcgcggttcggcgccgcggctgttcctgatggtgtacggcttcggcacgctggtgacggcattcatgtccaacgacgccaccgccgtggtgctgacgcccgcggtgctggccgccacccgcgccgcgcgggtccggcatccgctgccctacttgtacgcgtgcgccttcatcgccaatgccgccagcttcgtgctgccgatctccaacccggccaacctggtcatcttcggcacacgcatgccgccgctggcgggctggctggcgagcttcgcgctgccgtcgctggccgcggtgctggccacgctggcagcgctgtggtggacccagcgcgcggcgctggccgagcccatcgaacatgacgtgccggtgccgccgctgtcgccgcaggcccggctgaccgcgctgggcatcgtgctgaccgggctgatcctgctggtggcctcgctgcgcggcaacgacctgggctggccgacctgcgcggcgggcgtggccacgctgctgctggtctgcgcgacccggcgcgagctgctggtgccggcgctgcgcgaggtgtcatggggggtgttgccgatggtggcggggctgttcgtgctggtcgcggcactggagcagaccgtggtgatcggccagctggccgatgccgtcgcagcggcgtcgcgcgacggcggcgcactggccctgctgggcgtgggcgcggtggtggcgctggcgggcaatatcgccaacaacctgccggccggcctgatcgccgcctcggcgctggcgggcggacatgcctcgcatgccgtgaccggtgccgtgctgatcggcattgaccttggccccaacttgtccgtcaccggctcgctggccacgctgctgtggctcacggcgctgcggcgcgaagggcatatggtcagcgccggccagttcctgcgcgtgggggccgtggtgatgccggcagcgatgctgccggcactggcgcttttgctgctttaggccgctggctcagctggtagcggcgtcattggccgcgggggtgttggcggcctgcggcaggggccggcgcaggccggtcgcgccatggcgcacggcactggcgtggtgttccgccacgccagtttccaccggcgtggccggcagcggcactgtgaccacatggagcagcatcaggctgctgcacggaaaggcaatcggcatgatgacgttattcccgacaaagagtcaggccgcgcgctgcagcggccgggtgccggcggctttatggcgggctgcctggcgttgtgcagacattatgtgcgcttgtcggcgttgtgcggcgcgggctttagcgatgtcatgaactattcacggagcaacgtcggcttgtggcgtaatcggcccaccgcgccgcaccttgccatgccccgtgcgggttgtgaggccacggcatctgccatatagtgaatccggcacacccgctgcgcagtcatccatcccaccacgcataaccatgaccagcaaggacgcggcgcaccgcgcgaaggacagcaacgccggcgacgatgccggccacccccacgcccccagcgtctccgcccgcatccgcgcacggctcgaggccgcgcaggagcgcttccacgccaacgacaatatttcgcaccacatcgagccgggcgagatggagcagcttcaggccgaagtgcaggcgcgcctggaggacgtgctgcgcgcgctggtgatcgacgtcgacaacgaccacaacacccaggaaaccgcgcgccgggtcgccaagatgtacctgaaggagatcttcgccggccgctacgccaaggcgccgccggtgaccgagttccccaacgtcggccagctcaacgaactgatgatcgtcggcccgctgcgcgtgcgcagtgcctgctcgcatcacctgtgcccgatcatcggcaagctgtgggtaggggtgatgccgaaccagcattccaacctgatcggcctgtccaagtacgcgcggctagccgaatggatcatgtgccggccgcagatccaggaagaggcggtggcacaggtcgccgacctgctgcaggaaaagatgaatcccgacggcctggccatcgtgatggaagccgagcacttctgcatgcactggcgcggcgtgcgcgacaccgatgccaagatgaccaacagcgtgatgcgcggctcgttcctgaaggacgacagcctgcgccgcgagttcctcacgctgctgaaccacaaccgcggctaggccgcacgccccgcccaccagccgccacaaccgagcgccacgcccatgctagtccgcctgctctatgccagccgtgcccgccaggccatcgacgccgccctgctcgacgccatcctggccaccagcctggaacgcaatccgcgccacggcatcaccggggtgctgtgccacggcaacggcatcttcctgcaggcgctggaaggcgaccgccaggacgtatcacagctgttccaggcgatcgcacgcgacccgcgccaccacgacgtgaccctgctgcatttcgaggaaacctgcacgcgcgactttgccggctgggcgatgggccaggtcaatgcggcgcgcatcaacaccgccaccctgctcaagttctcggcgcgcgccgaactggatccgtaccgcacctgcggtgcggcgtcgctggccttgctcaaggagctgatcgccggcgcgtcagtggtgtcgcgcaccggcgaacgcggacggcactgagcctcgccgtcaggccgtcacctggccgaacaggccgcactccaggtcgctctcgaattcctcgacccagaccgaaccggggcctgcctcgtagacactggtcttgtccgtgccgacccggcgcacgctgatgcgccgcaccccggcctcgcggctttcctcgaaaatctcgaacatctcggccgccagcccgacctgcctgcatacctgcaggacctgttgctgctcgtcggcgggaaattcggtgaacggtctcgttgccatggcatcctccgtcaaggttgagatcgccgcttgcgcgcagcgctaacgcacgtggtgcacgggcaccacgcctggaaaagacatgccgcggccgtcggccggcggcacacctgcgcgcccgccgcacaactgcggcgggccgcaaaccctcctgggaggtagttgttcggactcagcggactcagctcttgcgctgggtcactgccacgaacggggccggtgcgtgctggacggactggctgccgcagttcgggcagttcggatgggcagaggcgtgttccgcgagatgctcggttttctcgaacatatggccgcacttctcgcagcggtattggtagacgggcatggcgttccccaacgcggtgcacgcgccgcggggcgcgtgtcagcttcattctaggacagcggtccgtgccccgaagcgtgaaagttcgccgtgccggagccggcgcgctgcgcgcatgcggggatgtcaccgcgaattcactttctctcgcggcgctcctgcctgccgctgcgtgaatgcgtcttccgccacgcattgacataaggcaaatagccggccgcgctcgccgcggaacaagcgacgcaatgctgcgcaaacccaggtcaagcatcgcggcatggcgccgttctattggcaggtcacgcatttcccaaactggccgtgtccatgcccgcctcagctagttccctgaactagctgaattacgattcaaggaggtgcggaacatagccagaatctcggatttgtggtggcgcaatcgcccagtgcaaccggcgtggaccggttgccgcccatccggagatagctatgtacgacggagtcttgcgtgtcgccctggcggacgaccacccgctggtcgtggccgccctgcgcgactgcctgcagcgcagcggcagtgcccagatcagctgcgaatgccgcaacggcacggagttgctcggcgcgctggaccaacatcacgccgatatcgccatcaccgatttctgcatgggccacggcgatacctcgctggacggcttcaacctgctgggccgcctggcgcgtcgccatccgctgacgcgcgtggtggtgatcagcgcccagaccaatcccgccatcatccgccgcgccatgaagcttggcgtgcgcgccttcgtcagcaaggaagaccacctggaggaggtcgtgcgcgcctgcatccacgtcgcatccggcggcagctgcttctattcgcccgcggtgcacgccatcctgcaacacgccacgctggccggcgcaccggccaccgaactgacgcagcgcgaactggaagtgatccggctctatgtgcagggcctgcagttgaccgacatcgccggcaagctcggccgctcggtcagcaccatctccagccagaagaccgtggccatgcgcaagctgggggtgcagaccaataccggcctgatccgctacgcctatgaaaaccgcctgatctgacacggccggaacccgccgatgcagcaaaccgtcgaccgtgcccgtgaaaccctggccagcgccttcgatgcgcttgccgacaatgcgaggcgccagcaacaccagtattcagtgaccatcgcggtgctgatcgccatcgtgctgttctccggcttgctgcttgccggcctggccacggaacaacacctggactaccgccgcagcgacgtctcgcggtacgccggctcggtctcgcagttgctgcataacgagtcctcgttcctgcggcgcaccgtgctgggcatccgctacaacctggatgcacccgcaccggagccatcgcgcgatcccggcttcggggccttccggcgcaccggcaccgccagcctccacgtcgatgccgtgcgcaaggactatcacctgcttgccaccgagacaacgcggcagggctggggcgccgggctgccggcgcagtacgtgcggctgcggcagattgccctggctgcggtggccacgcaacaggcgttcgatctcgaccacggggcctacgcggtcgcgctgaacgaggacagcgccgtggtcatcagccagcccgaggccggcgcgccaccgctcgcgctcgacccggcgctgatcccgctgctgcgcacatggctgacccaggcgctgctggagcgcagcggccgcagcgtgccggcgcgcgagcagcaggtctgggtgggtccgctgcgccacccggtggacgacactccggtcatggtgctggccggcgccgcctatgccggcgacacgcccaccatgctggtggccgcctgcgtgcccctgcacgccttcctggccgacttgcagcgcgcggaggatccggcgctgctggcactgctcaatccagccggtcaggtcatcgatgtatcgccgcaagactggccggcggcctcggccagcgtcaacgatgtggcagccggcacgcgcctgctgtcgcacagcaggctggatgtcacgccatcgggcatgcggctggtgcagccgctgccggcaggcttcgggcagctggtctaccacctgccgtatcgcatgctgggcacggcgctggcagcggagctggccgtgatcgccggcgccatgctgctgctgaccggcgccatcgggctggccgcgcgctactggagccggcacctgctgcggcgcacgcacgccgaagcctcgcgtgcgctggaaagcgagctgatgaaccaggtgctggtcaatgccacgccgatcggcctttgcatcgtgcgtcagcacgactacgccgtcctgacgtcgaacccgctggccggcgtgctgctgcaatggcagccccatgggcacctgcccgatgccgtagcggaggcgttcaagaaacagccatgcggtggcagcagcggacaagcgtccatttccagctttaccgtcgcggcaccgccgcgcgtgccggcggatgagccatccggccacggcgacgccacccagcacttcctgcaaatcacctacgcgccggcgcgctaccgcgatgaggcagtgctgttctgcgccgtgcaggactgcaccgcgcagcaggcactgcaagagcagttgcgctccgcccagcaggccaccgaggcaatgatgcgcgcacgctcgaccttcttcgccgcgatgagccacgaaatccgtacgccgctgaacgcattgctgggcaacctggagctgctcgcgcgcggcagcggcctggcggcacacgcgccccggctcagggcgctggacagcgccgccgaggcgctgcgccggatcgtcaacgatgtgctggatttttccaagatcgatgccggcaagctcaggctggtcaacgcgcccttccgccccgtcgaggcgctggaaagcgtggcgctgacccatgcgccgatggtggccggccgccccatccgcttccacctgcagctgtcgccatcgctggatgctgaggtcacaggcgaccgcatgcgcctggtgcaggtgttgaacaacctgctgagcaacgccttcaagttcactgccagcggccgcatcaccttaaacggcgagctgcgccaggaccaccacggcacgcagcggctggtctgccgcgtcagcgattccggcatcggcatgccgccgtcgctggcggcgcgcgtgttccagcccttcgtgcagggcgatgccgcaaccgccagccgctacggcggcactggcctgggcttgtcgatctgcgcccggctgtgcgagctgatgggcggcagcatcagcgtggacagcgtgccggacgtgggcagcgcgttcacggtctcggtgccgctgccggcggccgctggcacgccgctgccgccggtcccgcccgccgcggcgcagtgcggcgacgtggtcgtgctgtgccagcacatgcgtaccggcgaggccctggccgcgtggctcgccacggcaggctggcgtgccgatgtgctggcatcgcaggcggccgcactggcgtctttccaggtcaaggtgccacgcgttatcgtcgccactgaagagtaccccctggccgcactggccggcctgcgcgatgcggcaaaggtcccggttgtgtgggtgacacaggagggcccgcatcggccgtgccagtgcgcccccggcatgcacgaagtcacggcctacagccaccgcgcgctgctcgactgcgtggcccaggcggccgaaggcccggcgccggcggcgcaggcactcccggcatcggccgaggcgccgctgacgatccttgtcgccgaggacaatgcgctgaaccagaccctgatcgccgaacagctgcaggcacttggctgccacccgatcgttgctggcaacggcaggcaggcactggcggagctgaagagcacgcacatcgacgccgtgctgaccgatatccatatgccagtcatggacggccatgcgctgctgcgcgcggtgcgcgcgcagcatcccgacatgccggtactggccttcagcgcattcactggcagcgagccatgcgcagactggcgcctgcgcggcttttccggctttatcgccaagccggcgtcgttgcaggacctgcaggcgtgcctgcatggcctgcccggccgccggcatgccgcggcccctcgcaccaatgacgagccagctgcggcttcccaggcagaaaccgctgatcgccgccgctacgaagccatgctgcgccggcagctgcaacaagacctgccagcgttagcgcacatcattgcgcagcagaacctgccggcattgcggcactgggtccatgccgcagccggcgccttcatgatcgtgcgccgccagcccatcgtcggggcatgcctggcactggaagcactgtgtgacggcgcccaggcgtggaccccggccgccgcagccgcggccgaagccctgcatgaacggctgcgcggatacgcgcaggccgccgcagcggaataatgcgcgcggcgcgctgcgccttaccacaattagcggatttgcgagcatcgccacgcgggacgataatggcaacgctgcgccatggccgtcctggccatgcctgagcaatgctggcgcggcattgtcttcaatgtctctccccatgcagccagaacaaggccttccccagccacagcggacctgggcgatcctcactgttttcttcggcctgatcatggccgtgctcgatggttcgatcgccaacatcgccttgccctcgatctcacgcgagctgcaggccgatccgtccagcacgatctgggtggtcaacgcttatcagctgacggtgaccgtgtgcctgctgccgctctcgtcgctgggggacatccttggctacaagcgcgtgtaccgggcggggctggccaccttcctgctgggctcgctgctgtgcgcgctggcggtcaacctgccgatgctggtggccgcgcgcgtgctgcagggcatcggcggcgccggcatcatgagcgtcaacacggcgctggtgcgctttatctacccgcccacgcgcctgggccgcggcatcgggctgaacgcgctggtggtcggcgtgaccatcgccgtgggcccgtcgctgggcgcgctgatcctggcggtcgccagctggaaatggctgttcgcggtcaacgtgccggtggccatcgtcgcgctggtgctgagccgcacttcgctgcccgcgacgccgccgcagccgcgcgagttcgactaccacagcgcgctgctgtcggcgctggtgttcggcatgttcatcctcggcgtcgacggcctgggccacgcccgctggcgcatcgcaggcgccgcgggcatggccgccgctgtgatgctgggttggctgctggtgcggcgccagcacgggcgccccgcgccgctggtgccggtggacctgttttccagccgctccttcacgctggcggtgggcacctcgttctgctctttcatgacgcagatgctggcctttatcgcgctgccgttctatctcgaataccagctcggccgctccctgcaggaaaccggcctgctgatcacgccctggccgctgatggtggcggtgatggccacggtgtcgggccggctgtcggaccgctatccggccagcatcctcgccggcatcggcctggccatgctggcgggcgggctggtcgggctggccacgctgggcccggacgccggcagcctggatatcgtctggcgcatggcgatgtgcggcacgggcttcggcttcttccagtcccccaacaaccgcgccatgatcggcgccacgccgcccgagcgcagcggcggcgccagcggcgcgcaggcgaccacgcggctgctggggcagaccagcggcacagcggtggtggcgctgctgttcagcctgacgccgaccggcgcggcgcgcattgcgctgtatctggcggcggtggtggcggcgctgggggccttgatcagcctgagcaggttgcgcgatgccagcggcgcggaacctgcgcggggggcggtggagccggacgcctgatcagtgattgcgtgctcccctctcccgcaagcgggagaggggagcaaaccctctgggtttaaaggcctactccgccttcgcccccgattccttcaccaccctcgcccattttgcaatctcctggcgctggtatgccgccagtttctccggcgtccccaggatcggatccagccccagcgtcttcagcttcgcctgcacatcgggcagcgtgaagatgcggttgagttcagtgttgagcctggccaccacatccttcggcgtattggccggcgcgaacacggcgaaccatgaatcggcttcaaatccaggcaagccctgctcggccagtgtcgggatatccggtgccgaggccgagcgcttcgcgctggtaatgcccagcgcgcgcagcttgccctcgcgcaccacgggcaaggccgacggcaggttgtcgaacatcatggtgatatggccgccgagcaggtcggggatggccatggctcggcccttgtagggcacgtgcgtgatcttgacgccggccatcgaattgaacatttctccggccacgtgcggcgaggtgccgacgccgggggtgccgaaggtcagcgcgccgggcttgctcttcgccagtgcgatcagctcggccgtggtcttcgccggcacgccggggttgaccaccagcacgttgggcgtcgaggcgatcatcatgaccggcgcgaagtccttcaccatgtcgtacggcatcttgctgtacagcgcgccgttgatcgagtgcgtgccgaccgtgcccagtgccagggtgtagccgtccgccggcgcgtgcgccaccgcctcggcgccgatattgccgcccgcgccgggcttgttgtccacgatcacgggctggccccacgatggcgagatcttctccgagacgatgcgcgccagcgtatcgggcgcgccgccggtcgggaagccgaccacgatccggatcggcttggcgggccaggtttgcgcgagcgcgggggccgcgccgaccagcgcggatgtgacaagcattgccgcggcaagggtgccgaaacgcatgggtgttcctcctgttgccggcggctgcgtggccgcctgctatgtgaagacggcggccactgccgccgtctgaacctgctaagctctataccgcgatgccgccgaactcctgcatcaccttgtcatgcaggcgccgcatgccgcgcagccagcggtcatagtcctggcccttgcggcgatagtactcaagcacctccgggtgcggcaagatcaggaagcgctcatcggccaccccttccagcgtcaccgcggcgacgtgctcggcggtgaccgagccttcctgcaggaagcccttgcgctcgcccttctcgccgaacagcatgttggtctgcacgccctgggggcagatgcagctgaccttgatgccgcggtcgccgtaggtgatcgacagccactcggcaaagccgatggcggcgtgcttggtcaccgcatacggcgccgagccgatctgcgacaacaggcccgctgccgacaccgtgttgatgaagtagccgtcgccgcgctccagcatctgcggcagcaccgccctggccgcgtggatatgcgccatcacgttgatttcccagatgcgctgccactcgtcggcgctcgcatccagccccttgcgcaggatgatgccggcgttggaacagaagatgtcgacctggccaaagcggcgcgtggcctcgtcggccaggccctgcacggcggcggcatcggccacgtcgaccggctgggcgaacacctggcacgcaggcgccgcggcctggacctcggtggcaacggtggcggcgccggccgcgttcaggtcggccacggccacgccgcgcgcgccggcctgcgcaaaggccagcgccagcgcgcgcccgatgccggtggccgcgccagtcaccacgacggtcttgttgcgtacttccatgggttgtctcctcgttgaattcagtgcccgcgtcatgcgttggacgcgtgggtatgggtatcagggtctggctgcgcggaagcaaagcgggcggtcgcgcgcgcgccgccgggttgccacagccgcgcctgcagggtctcggccagttcgcggatgcgcgggcccaggttgctttccaggatctcgggcgacagccgtgtcgcggccccgccgatattcaacgccagcacctcgctgctgcccgccaggcgcagcggcgcggcggcgccgctgacggtgcggtcccattcggcatgcgccacgcagaagccgcgccgtgcgtagtcgcgcagcgcacggtcgatgccggtgcgcacggcgggccagcgcgagccatagtggcgcgccagttcggccagcgcggcctcgcggtgatcggcatcgagccccgccagccaggcgcggccgatcgccgaggtggccatcggcaggcgcgcgcccggcgccagccggatcaccagcgccccgcgcggctggcagctttccaggtagaccatggcgtgccggtccggcatggccagtgccaccgtgcaatcggaggcaaacgccagcgactgcatcagcggctgcgcgatctcgcggatgccggcgccgcctacatagcggtggcccagcaccatcgcgccctgccccagccggtacttctcagtggcttcgatgtaggtgagatagccgagcgtggccagcgtgtaggtgagccgcgacacggtcgggcgcgggatgccggtgcgccgcgacagctcggcgttgcccaggtaatcgtcctgcggcccgaaggcgcgcaacagctccatgccgcgtgccagcgcggtgacgaagttgcggtcgtcggcgcaggcatggcccgcctgcgcgtcggccggcaccaggacatgtgcggcatcgggcggcggggttggaatggtggtggtgcgtttcatgggcaggcggccgggaagagaacattgatagcagcaacggggctgcgcagggaccgctatgtagggaaagcatgtgccatagaaacggcgttgatggatacgaatcaaaaagttagtacggcttttgccggacgaaattcttgtaaatacaaaccattctcatttatgatgcgccattttcgtcgttttcaccttgcgccctcatgcttgtccgccgtcttgccatacccgccgccgtcagttgcctgttcctgccttccgttgtttcccacgccgccgaagatctcagcacgctgccatccgtgacggtcagcgccgccgccgacgggcaaactgacgtaggcttcagcacgcggcggccggccggagtgaccaagtcggatcaatcagcggccgacgccgcgcagtcgatcaccgtcattacgcgtgacctgctcgacagccagcaggcacagaacctcagcgacgcgctgcagaactcagccggcgtggtcaccaacgtctatggcaggcgcggctgggacgacttcatcatccgcggccagcgtgcatcggaatcgatctttgccgacggattgctcgtcgacagcaacaaccgcgtggcgcaggagctgttcggcgtggaacgcgtggaagtgctcaagggaccggcctcgatcctgttcggcgcggtgcagccgggcggcctggtcaacatggtcagcaagcgcccgcgtgccgaactgttcggtgaactgggcctgaccgtcggcaactacggcttccggcagacgacggtcgacgtcggcacgccgctggccaaggacagcaaggccgcgttccgcctgaacgcgctgatgatgaacagcgacgatccgaccgactacgtctggtatcgcaaccgctggatcgcgccatcgctgacgctcgaccttggcacgcgcacggacttcacgatcctggccagccacagccaacgcaactacgtgcgccagcagggcctgccagtgaatggcaccctggtgccgaaccgcaatggcgtggtgccgagcaaccgcttcatcggcgagccgaatgcgccgtcttatgacggcgagcagaaccgcatcggctacgcgctgacgcaccgcttcgactccggctggaccttgaaccagaacctgcgctaccagacgtcgtcgctgaccggcacgctggtgtcggccggcaccatggccgtcaacagccaggcgatgaaccgcagtggcacgcagcagagcttctcgggggactcgttcggtgttgacactaacgtgcagcggactttcgcgttcacggggcatgcccacagcgtgacctttggcatcgactaccgccatacgaaggaagaccgcctgcagaagacgtgccgcgtggcagcgctgaacgtctacaacccggtctatggcgccagcatcaactgcccgtccgcctatagcctggacgcgaccgatacgctaaacgcggttggcctctacctgcgcgaccagatccgtatcgccgagcgctggaccgtgaccggcggcgtgcgctacgaatccgcgcagacgagcacgacggaccggctggcgcggtcgcgtaccggcaacgacgacaacgccgtcaccggcagcgcgggcgtgatgtacgacctgacgcactgggcacgtccgtacctgagcttcgccacttcgttcctgccgaacgccggcaccgacgtcaacggcgccacgttcaagcccgagaagggccgccagtacgaagtgggcatcaagttcgacatgccggacaagaccggcctgctgaccctggccgcgttcgacctgacccgcaccaatgtgctcagtaccgatccggttaacacaggcttcagcgtggccgtgggcgaacagcgttcgcgcgggctggaaatggagctgacgcaggatctcggcaatggcctcagcgtttcgggcgcctatgcctatatcgcaagcgaagtcaccgaagacaccacggctgcgaacgtcggcaagccgctcaacagcgtgccccggcacagcttctcggtgtggagccagtaccgcttccgcggcgcgctggctggctggtacgtcggtgccggcgtgcgcggcgagagcgccaagcgcggctacagctttaactacaccgtgccgggctacacggtggccgatcttgccgtcggctacgtggcatcgcactggcgcgcggcgttcaacgtcaagaacgtgttcgacaagatgtactacgcgggcggcctgaacaacaacgtgctaccagtgggcaatccgcgggtggccatgctcaacgtgacgatgaactattgatgcggcccccgcctggagcctcctgaccagtagtcaggcggccatcaagctgatgtggctggccttgcgcccgccccatcgccgcaatcaccgcccctaaaatctgcatcccccgctgaatctgctccaccgtcaaactcgcataaccgagcaccagcccggccgctcgacgctgtccgtgcggccggacccctgcaaacaacggtgataccgggtagacccccacatcctggctgcgcgcagcggccaccagcgctgtctcgtcgcggggccgcagcgacggcaaccacagcaccacatgcagccccgccgccgtaccgcagacttccgcgtccgctggcaggaaacgtgcgacgccatccagcaaggccgctcgccggcgctcgttttcccggcgcatgcgccgcacatggcgttcgtaggcaccgctttcgatcagcgctgccagcacgcgctgctccagcacgggcgcatggcggtcggccagccgcttggcctgccggaacaccggcaccagctcaggcggcagcaccaggtagccgagccgcagttgtggcgacagcgccttggagaaagtgccgacgtagatcacgcggccgtcggtgtcgatcgagcgcagcgtgtcgatcgggcgctggccgtagcggaactccccgtcgtagtcgtcctcgatgatccaggcgtcgtggcgctgcgcccattgcagcagctccaggcgccggccgatcggcagcacgccccctagtgggaactggtgcgacggtgtcacgtacaccaggcgcacacgatcgtcctggggaaggctggcggtatccaggccattcccgtccaccggcgtggcctggcacctggcgccggtggcttcgaagcagcgcctcgccatcaggtagccgggatcttcgaaggcaaaggcgtcgccggcatccagcagcagccgcgcgcacaggtcgatggcctgctgcgagccatgcaccaccagaacctgctcggcctcgcaggccagtccccgggcacgccgcaaatagccctggagggcgcgtcgcagcgacgcctcaccttctggcggggcgtaagacaggctgttttgctggcgcagcagttcggcctggtaggcacgccgccaggccagggttgggaagtcccgcgaagccaccgccccatacaggaagtcgaaacgaaccggttcagcctgcagcagtgccggcatgccgagtcccgccacgcggcgcccgaattcggacagggttggggcggtcctggcgcgccggcctgcgctgatcccggctggtgccggtgccgccagggggctggcgattcgggccacgcgccccaccgcagtgacgaggaagccctcggcagcaagttgttcgtaggcggcggtgacagtggtacgcgacacccccaactcggacgccagcgcccgtgtggacggcgcccgggcgcccggcggcagggtgccgtccgcgatctgggcacgcagaagatcgtagatgcggcgccccgcgcccgtggctccggcacgggtaccggctggctggcgtgactggcccataaagaatcatgaaaaccggaccttccgattgtgccagttgtcggcgacagtatcgagcattccatcgcttccgattccccaccatgtatattcctgctcactttgctgaaaaccggccagaggaactgggccgcatcatccgcgagcacccgctggggatgctggttacgcaaggcagcgccggactggatgccgaccacatcccgttcgagttcgatcccggcgagggaacccacggcgtgctcacagcccacgtggcccgcgcgaacccgctctggcagcgttgccccaccggctcgccggtcatggtcgtgttccggggcgccgaggcctatatctcgcccaactggtacccgagcaagcatgaggcgcaccgccaggtgccgacctggaactacgaggtggtgcacgcgcacggcacgatcaccgtgcatgacgacgagcgttttgttcgccgcctggttgcgcgcctgacacggcggcacgaggcagccgaacccaggccctggaagatgggggactccgcgccggagtacatcgacagcatgctgcgcaacatcgtgggcatcgagatcgccgtcacttcgctggtgggcaaggtcaaggtcagccagaacagggagttgcgggatcgcctcggtgccgccgacaccctggaggcgcgggggtatggcgaacttgcgcagtccatgcgcaaggctggttgaattgcccccgggcccgcgctcagcttttcctcaccattgacgaataccccgccatgtcattcatccccttcctgatcgcagccatcgttctcgccatcacccccggcccggccatcgcctatgtcgttgcacgaacggtggctggcggccgatccgcaggcctggcttcatgcttcggcaccgccctcggaggcttgctccatgtgctcgcggcagccttgggcctgtcgctggtcattgcccagtcggccgtggcattcaacctgctcaagtatctgggtgctgcttatctggtgtacctggggattcgcatgctgatgcgcaagcaggcgccggtcacgctcgaaaccatgccatccagaggtgcgcgccgcgctctggtcgagggcatcatggtcgaggtcctgaacgtcaagacggcgctgttctttctggcgttcctgccgcagtttgtctcggcgagcgaagctctggtgccgcagttggtgctgttgggctgcatttgcgtcgcgctcaatacgctggtcgacgttgttgtcgtgtttgccgcgcatcgtctgctcaagtccggcgccgcccgcgaagctcgcgcccgcttgatgacccggatgtcgggcgtgacgatgctgggcctgggcgccattctggcgctcgcccggcgcgaagcatagacaggggggcggttcggcgcagggctcgaaccgcccgcccctcaagcagcagcccgccgggccgcgccgcgatactgcgccagcaacgcgtcccgccgtactgccgccgcatccatgctggcctccttcacgtggccgtagccgcggatatcctccggcaacgcggcaagcgccagcgcggtgtcgacgttgtccgcgctcagggacgccgcgaactcgtcgaccaaggccagatagtcgttgaccagcgcccgctcggcgcggcgctcggcagtcttgccaaacacatcgaacgccgtgccacgcaaccccttcaggcgcgccagcaagcggaatgccgtcatcgtgcgcggaccgaagcggcgcttgaccgggtggcccttgtcggtcttggccagcagcggcggcgccagccagaaattgagctggtagtcgcggccgggctccccttcaaactgggcgcgcagcttgtccaggaaggcgggatcggcgtagaggcgcgccacctcgtattcgtctttgtaggccatcagcttggccaggttgcgggccacggcctcggtcagcggcagcttgcggtcgatgcccagttgctgctccgcggcgcggatgcgctcgacagcctcgcggtagcgggcggcatatgcagagttctggtattcggccagcatcgtctcgcgcttgcggatcagggtgtcgagcgcctgcgggattgccacgacctgtgcggccggggccgccggagcacccggcaagtgcgccttgaccgccgcctcgccatggtgcgcgagataccgcccccattcgaatgccagccggttcttgtcgatcgacaccccattgagttcgatcgcgcgcagcaggctttcacgctgcagcgggatccagcccttctgccaggcaaagccgagcaacagcgggttggagtagatggcgtcggccagcagggtcaccgcccatgcgctggcgtcgaagaatgcgcaggcatcgcccacgctggcgcgcaggtcctgctcggcgctggcaccggggaacttccacttcgggttcttgatgaattccgcggtgggcgtgttggcgctgttgaccacggcggcggtcaggccatgccggaccttcgacaacacctcgggcgacgccgagacgatggcgtcgcccccgatcaccaggcgcgcctcacccgtcgcgatacgcgtcgcatgcaggtcgtccgggcccggtgcgatctgcacgtggctgatcacagccccgcccttctgtgccaggccagccatgtcgagcacggtcacgcccttgcgttcaaggtgcgatgccatgcccagcaggccgccgatggtgaccacgccagtgccgcccacgccggtgaccagcacgccgtatggccgctccagggccggcagccgcggcagcggcagcgcctcgaagtcggcgccggtgcctttgccacccgctgccgcgggcttgcgcacctgcgccccctcggcagtgacaaagctcgggcagaagccgttgacgcaggagaaatccttgttgcacgacgactggttgatcttgcgcttggtcccgagttcggtctccagcggctccaccgacaggcagttggacttggccgagcaatcgccgcagccctcgcagaccgcgtcgttgataaaggcgcgcttggccgggtcaggataggtgccgcgcttgcggcggcggcgcttctcggtcgcgcaggtctggtcgtagatcaggatggtgacgcccgcggtatcgcgcagctcgacctggacggcgtcgagctggtcgcgatggaacacagtcacgcccgacggcagcatggcgccgtcgccatacttctgcggctcgtcggtgacgacgaccagcttcttcgcgccctcggccagcacctggtgcgcaatctgcggcaccgtcagcacgccgtcgatgggctgcccgccggtcattgccacggcgtcattgaacaggatcttgtaggtgatattggccttggccgcgatcgatgcgcggatggccagcagccccgagtggaaatacgtgccgtcgcccaggttggcaaacacgtgcttgtcgccggtgaaatgcatctggccggtccaggccacgccttcgccgcccatctggctgaaggtgtcggtattgcggtccatccacagggtcatgtagtggcacccgatgccggccagcgcacgcgagccctccggcacgcgcgtggacgtattgtgcgggcaccccgagcagaaccagggcttgcgctccaccgcgatgcgcggctgcgcggcctcgcgctccttggcctcgatcagcgccacgcgcgcggcaatgcgtgcgcgcaccgcttccggcaggtcaaagcgttccagccggcgggcgatggccttggcgatcagcgccggcgacaattcatagtgcgcgggcagcagccagttgccacgcggcaccgaccactcgccgccatcgttgccacgctggtcgaacttgccgaagaccttgggccgcacatcctcgcgccagttgtacagctcttccttgagtgcgtattcgaggatctgccgcttctcttccaccaccaggatctcttccaggccggtggcgaactcacgggcgccgtgcgcctccagcggccacacgcaacccaccttgtagacgcggatgccgatgcgggcgcacgtgtcatcgtccaggcccaggtctgcgagcgcctggcgcacgtccaggtacgccttgccggcagtcatgatgccgaagcgcgcgttcggcgaatcgagcacgacgcgattgaggcggttggcccgcacataggccagcgccgcataccacttgtggtcaagcagccgcgcctcctgctccagcggggaatcgggccagcggatattgagtccgccctgcggcatgacaaagtcctgcggcagcgcgatctgcacgcgctcgggatcgatctcgaccgaggcggtcgactccaccacgtcggtgacgcacttcattgccacccacaggccggaataccggctcatggcccagccatgcaggccgtagtcgaggtactcctgcacattggcggggtacagcaccgggatgccggcggcctgcagcacgtgctccgactggtgcgccacggtggaggacttggcggcatggtcgtcgccggccagcagcagcacgccgccatggcgcgacgagccggccgaattggcatgcttgagcacgtcgatggaccggtccacgcccggccccttgccataccacatcgagaacacgccgtcgcgcgtggcgccggggaacaggttgacctgctggctgccccagacggcggtcgcggcaaggtcttcgttgacgccgggctggaacaccacgtcgctggccgccaggtgctgcttggccttccacagggcctggtcgacgccgcccagcggcgagccgcgatagcccgagataaagccggcggtgttgaggccggcggcgcggtcgcgcgccttctgtagcattggcaggcggaccagggcctgcacgccgctcatgtagacgcggccctgctccagggtgtacttgtcgtccaggctggcgctggccagggcttcgagcaaggcggggttcagcggggcattcacgatctcagtctccgtgcttgttctcttgtatccggagcagtttagaaatccgtgccgtcatcgtaaaatcatgaattcaaacacctgatatctgaaaaacggataacccggagattcccatgttcaaggcgcgcgaaggctcggaaagactggccaaggaagtcacgctgaggcagttccgctacttcgtcgcggccgcggagaccgggcaattctcgatggccgcgaccgccgagcatgtctcgcagtcggccatcaccaatgccgtgctggcgcttgagcagcgcctggcggtacgcctgttcgagcgccggccccatggggtgacgttgacggcagaaggccacctcttcttccagcacgcccgccagatcctggattcggtcgaggatgcgctgcgcgagccgcgcttccaggtgcacgggttgcagggcagcgtgcgccttgccgcctcctatacggtgctgggctacttcctgccggggctgctggcgcgctttcgcaccaactatccggacatcgaactggatctgctcgacatggaccggcccgatatcgagcgggccgtgctggcgggggagatcgagctgggcatcgcgctgctgtcgaacctggagcggccccagcgcttccagcgccatacgctgatgcgatcccggcgccagttgtggacttcgtccagccatccgctgctggccgtcgagcgcccttcgctgcgcgatattgcggcctatccgtatatcctcatcaccgtggacgaggccgaggaatccacgctgcgttactggcgcagccaccggctcgcacccaaggtcgcattccggaccggctcgatggaggccctgcgcgggctggtggcgcatggcttcggcgtcaccgtgctgtccgacatggtgtatcgcccgtggtcactggagggaaagcagatcgaggcccgcccgattgccaatgcggtgccggacatggaggttggcatgctgtggcagcccgggcgcaagctgggcaagccggcggatgcgctgagggagttcctgattcacgcgtgcgggagctgaggcgggacattcgattgcccgcgcccttacaacaacgctatctgaaggaccggtagcctgtcgtcgagtagtccgtgtagaagtccgccaggcaatgcagattgagcgcccggatctcttcagtcatgaagtcaacaaaaacgcggatgcgcgagggcaggtgctggcggctgaggtaacagatgtaatgcccgcggtcgtcaggcgcataccgtcccatggcgatgaccagttcgccgcgggcgatgcggtcgcaggcctggtagcccgccatctgcgcgatgcccagcccgtcgagcaccgccgccagcaccagctcagggtcattgaacgtcagccttgcggcaggcacaaccttgcgcacatgcccctcgaccttgaattcccattcaaggatgcgcgcgccggcgatgcgggtgttgatgcattcgtgccgggcgatatcctccagcgtcgacggtagtccatgccgcgccgcgtaggcaggagacgcgcacacagccatctgcatcgggatcagctgcttcgcaacgatgcttgaatcctcgatgcggccattgcggaacgcgacgtcgatgttcccggccgcgaagtccgttggccggtcatcgagcaccaggtccagggaaatgtccggataagccgccgagaacttcgacagcagcggcgccaccaccttgcggccgaagccggccgtcgcgctaatgcgaagcaggccgcttggcggtccaaggcgcagttccagcatgtcgttcatggcctcgacgatatgcgccacgccctggtggcagttctcgaagaagcgctcgccctcgcgggtcagttgggtggtgcgcgtggtgcgcaggaacagccgggtgctcagctgcgtttccagcttcaggacgttgcggctgaccgctgagcggccgatgcccagccgctcgcccgccttggagaagctgccctcggtggcgaccgccatgaaggcgatgatgccggcgtagcttgccgcgaaactggcggacagcccgtccgcgcgatccggcgggccggggcgaaagccccgctgcggcataccggttacgtctctatccgcccccccgcggttgacaggggacgtcaggcgaacgtctggaacgacgatgtccatgtcattgcctttcggagcggcgcaacgaatgaggatccacgctgtgcggtgcacaaccatggcatgatcgtaatgacccgccatgcccgggtaaatgacagatgcccctggatttctgccatccggcccggcgcgagcggcgacaatgcagatatgaagcagcggaaggcgccggtccacagggccttccgctgcgatccgtggcgaaggcgtcgcactgcgcgtgcttgccggccacatgccttgcgcgggatcgcgccggcggcataacatccatcgactttcaagatccctgccatggttccctctccgcctgcgccctcttcccggacacttgacgaccagccacgcaatcttctgttcgtggccttcccggacatgagcctgcttgatctcaccggaccgcaaaccgtgttctgggctgcctcccggtttgcacgcgaacgcggcttcgccggctaccggagctatctggcaagcgagcacggcggcctggttgcctcggccgaaggcaccgccgtgcaggccatggcgctctcggaaatcgatctgcagcacatcgatacgatcatcctcccgggtgcccccgagatggtcagggtgctcgacagcgccacctcgctggtcgcctggctgcagcaggccgccggacaggtacgccgcgttgcctcggtctgcagcggggccttcctgcttgcgcaagcgggcttgcttgacggcaggcgcgctgccactcactgggcgatgcatgcgcagttccgcgcgcgctttgccgcggtcgaactggaccgggacgccattttcgtccgccaggaccgcatctggacctcggccggcgtgaccaccggcatcgacatggcgcttgcgctggtcgaggacgactatggccacgatatctcgctgagcgcggccagggagctggcggtcttcatcaagcggccgggcacgcagccacagatcagcgagatcctgctggcgcagagccggcacgtgccgctgttcgaggcgctccatctatggatcatcgaaaacctgtcgcgggaagggctgtcagtggaacagctcgccgaacaggtcggaatgagcccccgcaactttgcccgggtctacaagcaaaagaccgggcgcaccccggccaagggggttgagcatttccggctggaagccgcacgccggctgctccaggacctgcatctgccggtggagcagatcgcaaggcagtgcggcttcggcagcgaggaacggatgcgccttacgttccagcgcaacctgggcttctcgcccagcgagtatcggtcgaaggtgaccggctgagaaaacgccacaacccggccgcaccattggtgccgaacgggaaacaccatgcgtccgccgccggcgctaccgtcactgcaccccttcgcctagcatgggacatgggttggatgcccatcccttccaccagaatcgaggtgcatgatgaagatcgttgtgattggaggtactggcctgatcggcagcaaggtcgtcgcccggcttgccgggcaaggccatgaagtcgttgccgcgtctccgcagaccggcgtgaatgcgctgacaggcgaaggcctgagccaggcacttgccggggcgcaggttgtcgtggacgtggccaactcgccatcgttcgcggatgatgccgtcctgcatttcttcgagacgtccggccgcaaccttgcggcggcggagaaggcagccggtgtcgcgcaccatgtggcgctgtcagtggtcggcacggacaagctctcacaaagtggctacttccgcggcaagattgcgcaggaagcgctgatccggaacgccggcatcccttacaccattgtccgctccacgcagttcctcgaattccttggcggcatcgtccagtcgggcgccgatggcgattccgtgcgcctgtcatccgcatcgatccagccgattgcctcggatgacgtggccgaagctgtggccgaccacgcccttgccgatcccgtcaacggcatcgtcgatatcgccgggccggaacgcttccacctgagcgacctcgtgcaacgctatctcgatgccaccaaggatccgcgcaaggttgtcgtcgatggcaaggcccgctatttcggcgccgaactgcaagacgatacgctggtaccggaaggcccggcacgcctgggcaagaccgctttcgaagcgtggctgcgacagagccagaagccgaaggcctgacaacgcgggcgggccatatggacaacaaggggctgcaagcccccccgctgagcctgctcgacaagtatcgcgggcagggcttccacgccctctacaccacgaccgtcaccgtctcgggcggggaaaccggacacggccgcgcctcgggcgtggcgcgttccgacgacggcaatcttgtcatcgacctgcggctgccggcggcgctgggcggccccggccacggccacggcaccaatcccgagcagttgttcgccgcgggatatgccgcctgctttcatggggcgctgaacctgctggcccagcgatccaatgtcagcgtcgacaacctcgcagtggaagtggagatagcgttcggccgcgatcccgttgacggcggcttcgcgctggccgcggacatccgggtcaggatgcctggcgtgcaacgacaggtggcggaagaactggtgcgcaataccgagcgcttctgcccctatgtgaagatggccaggcagggcattgtcagcgtcgtggcagtggttgactgagctgcgcgcaacgacgggcccgcggatgcgatccctgaaccttcgggatcgcatccgcagccggccaatgtgctacttcgttggcgtcaggatcggagcgcccttgttcttcagcaacagcaccatgaacttcgcgggcctggtgttgctggcgttgcgcccgacaatatgaatatcgtcagggccttcgtggaaggtctgcccggcagtcagcgtgacttccttgccgccccggactcccatcacgatactgccctcaaggacatagacgaatccgtgcgcgtcatggcgatgcaccgggtcggcgccgccgggcgggtattccaccacgatcatctgcacctccttgccgggatattccggaagcgcctctgtcgacagcagcgtcaccttgggctccggcggcgcagccatggccggttgcgccaccagcaggacggaaagcagcagcggggccaggcccagcgttctgatgattttcacgatgtcactccagctttgccttatcgaggccataggccttgtcggccgagcccggcacggtccggaaggccacgttcagccggttccagccattgatggccatgaccagaaaggtcaggtccgagagttccttttccgacagatgcgcgcgcacgcgctcgtacaggtcatccggcacaccgtgcggcgggatgttggtcagcacctcggtccacgccagcgcggcccgctcgcgcggctggaacagcgtcgattcgcgccagatcgcgacatggtgaaggcggagctctcgctcgccatggatgcgcgactgcttgacgtgcatgtccaggcagaaggcacagccattgagttgcgaagcgcgaatctcgaccaggtcacggatggatggctcgatcgcattgtcctgcagcagggtgccgaattccaggtacttcttgaagagttcgggggactgcttcatggcattcacgcgttgggtcatgtcggctcctgagggatggaaaatgtgaagggatgccgtggcactcaccactgcgtgccgcggcatggagcaaatcgtaggccgcggcggcgcacggcggtaggcgcgccaaggtacccacactgttgaggcttcgacaccaatcagggctttggcgtagcgcggctcgggggaagccggatcctgtcgtgtcgtgccgatccagcgcagaaaaccaaaagaaatggtgcaatgcaacataaatacccctatgcttggaggcatgccagccggctacgccttcgaaaagcgacccggacgccgctcgcctcccaagaacttgccaggtgtccgttattcatcggatgccgaaggaaaacccgcgtgccctcctcccctcttccgcagccgatcctcgacgcttctgcaaactcctcccgcctctttcgtgacatgtgcgaactgctccaggcagcaatacatgtcgtcagcattcgcaccacgcgcatggccatcgccggtccggcgcctggcgaacaggaccagcgcgaattcagcctgatgagcgttgagaaaggagaggccgcgtctgaatcgttgcttgccatgggttcgggatggatcaacctgaccatgaccctcgcaaaggacaccagcgatcatctttgggcgacctccgcggccgcggcgacgctggcgtccagtcgatccgccgcgcaatggttcgaacgccaggccgaccttctgcaattggccgccgggttccccggcaacccgctgcagctggcagacctggcgacaaacctgatgcagcagatcctcgcgccgatccacggccgcgcgatggcaaatgcgaagcgcctgcgtgcatcatgaaggctgccgggcccgggcgcatgcatcgctaggggcggtattagtcagcaatggtctccagcgctctgccacgggtctcgatgccgaaccggaacacgatgccggccgcagcaaggaaacacagcgcgccaaggcagaacactccagcctggccggcaacgggcagaaccagccccaccaacgccggacccagcagcgatccgatccgcccgaccgtcgacgccatcccgcaacctgaagcgcgcgcccgcgtgggatacagttccggcgtataggtatagagcactgcccacatgccgaacatgaagaactgcatcatgccgccggaaaggaagagcgccatggggtcgggactggacccggcgaccctgccgtagataaacaccatgcacgccccgcccaccagagtcgccacgcatgctggcttgcgcccccagcgctccaccgcccatgcggcccagagaaagccgggaatgccgccgattgagatatacaccgtgtacagcacggatttggttaccccgaggcccgattgctgcagcaacgcgccaatccaggtattgaggccgtagaaccccagcagggcgaagaaccacaggccccatacggtcaaggtccgactacggtactcgcgggaccagagcacgcgcaggcccgatgtggccggctccgccgccgctgccgccggcgtgacttccggcaacgcatcgagcttcatccgccgcatgaccgattgctcgatacggtcgacaatgtcggccgcttcggcatggcgtccctgcgactccagccagcgcggggactcgggcacaaagcggcggactacgatcaggaatagcgccgggaccgcgccgagcaggaacatcgtgcgccaggtgtaggcgctcagcacgtagtacgacatcagcccagcgcaaatgaaggcgatcggccagtttccgtccatcagcgccaggtacttgccgcgctggcgcgcgggaatgaattccgacatcagcgtctgcgccaatggcagctccatgcccatgccgagcccgagcaacagccgatacgcacccagctccatgggaccgttcgcggtggagcacagatagctgcccacgccccagatgatcatgctgacctggaagaccggcttgcggccgaacttgtccgccagcaccccggagctgatcgcgccagtggccatgccgacgaagctggcgctgccgagcatgccggcctgcgctgcggtcaacccgaattccgtccgaatcgatcccagcagatacgtcatcatggccaggtcgaggttatcgaaaaagaaggccagcgcaatgatggcaaacagaaggcggtgatacccgcatacgggtagccgttccagccggtcgccggtgcgcacgcgcatcagctcgagagaggtaagcttcatcttgtctccagtagttccagtaccagcgctcttgggcactggcggcaggcgataacgcatcgatgcgatatcgcctgctactgtcgcgtggagacgcagccgcgacgcgcgcgggaacgccaaggtctgtctcgcaggtgccaagccaattgccgcgggtcgcgtgggccccaaaaaaaaaggttcatcgccgatttccggggaaggccactggtccgacggccgagttcggccagcttgagtcgctcaaggaaatttcacgactgcccgctcccggaccgataagagacagtcgtcaatgatgctgtgaccgtcggctcgtagaccgttgcggcggtcgcgaacagaagccctgtgtcgcagaagaggcttggtcgtggctgcctgtccgtaggcagacacgttcgacaccagggcggccgggcaagcggctcagatcacgcagtcggaacagttcctccgtcgatgacgtactcagtgccggtgatggcgctggcgcggccagagacgaggaaaccaatgagttctgccacttcccggggtgagcatggccggccaagaggaatgccgccgagcgaatccatgatgaccttgcgggcgccttccgcgtcgatgccgccttggcgggcgatctcggcaacgagacctgcggcggcatccgtctcgacccagcccggtgagacacgcacgacgcgaacgcccttcggactgacctccttggacaaggctttgctgtagtttgacagggcagccttggcggcggcataggcaatcgtcgcctccggcaacggtaattgccgctggatcgacgtgacgtggataatgacgcccgaacgctgctcgaccatcgagggcaacagcgcgcgatcgatgcgcactgccgggaataggttcaggttcaatgccttgttccattcatcgtcatctagcacgctgaagccaccggccggtgcagatgagccgcccacgacgtgcacgactatatcgacgccaccgaaccgcttgagcacggcgtcgacaatggctttacagcccttggccgtcgtgatgtccgccccgatgaaccgttcttcggcaagttcatcgggacgggaacgcgccgtcgtcagaacgttcgcacctgcctcgcaaaggcgtgcgacgacggctttgccgacgcctttcgttccgcccgtaacgagcgcccgaagccccagaagttcgggtgcggagctcattggcgaatctccagcgacgcaatcctgccgccggccaggacgaacgtgtaggtcagctcgaccgggctgccagggaatgtgcccgtgagtcgtgcgtgcatcgtcacagtggcgccgttctgggagacgtccaacggctcaatgctgtactggtacctggttttgctgtccttcttccaggcctggattgcttccagccccttgatcgtgcggccttcgtcccgcacaacggcatcggcggtaaagcagttcgagagaggggcggtgtccgtgacggtttccgcgagcagataggcatccagtggcggaggcagcatcatgttcatcggggtttacctcaacgtgaaggtttgcatgccccaatcatggcgctacagttaccgtatcgcaagaacgcacaaaaaagtaagtaacccttggctaaccgaaaaaactacacccccgcgactgccgcaatcgatgtcgaagccgcattcaagctgctggaaggccgctggaagctggtgattttgtttcaccttttcggtggtcaggtacagcgcttttcggacctcgagagactgatccccggcatcacacagaagatgcttgcccagcagctacgccgcctcgaagcggacggcatcgtgacacgtacggtctatcatcaggtgccgccgaaggtggactaccgcctgactgattggggccaggcgttgtgcccggcactggatgcgatcctgacatgggcggagcaccgtgaagactttccgtaggctgcgacgagcttgcgtgcgtgacgctagctgtcatccagaactccaattcgcaaagtcgtcgacgtggtctcatccgcgatggtctcatgtcgcgctggaacctgacggtcgtccatctcatttgagaggcagcactggggcgaactgagacggccgaccgcgctgtgaaatcgtgtctccgatttgttcgacacttgcagtgcagcatgcaatgaaggcatcaaatcagaatatgcggatatcctaatgttcacctctccgctcacaggaaggcgtaacagttcgctcgggcatcgtatagcgcgtgatgccggcacccgctgaacacaagcgtcgttgagggcatcaacaacaccatcaaagtcatcaagcgccgagcctacggctaccgtgtcgaggactacttcttcctgaagatcaaggcggcgttccccggaattcctcgttgaaccaaaaagaagaggtgccggagcacctcttcatgtcgcgcgatggcctgactcacctggaagcaaacctgtggggatcgaatgcctccggcggcaagccggacagcgtggcaccggactggaagggatagcgcaggtacggcgctttcggctgacccggtggcgagtactgtccatcggcaagaatgcgtttcttcgcgctcatctcacgaatctcgcagcgataggcaacgatctggctggctgcgccgtcctcgatcggcgagtagtctttctcgggccggaacttgtccagcgcctggtactggtgcgcacgcacctcgtcggcactgtcacgcagcgtgacttcgcatcgcgcgatggcgctgtagtactcgaggcttgtattctgtcccttcggtgccttcagcaaggccacgggccggtcgacctcgatcgtgaccaggggattcgaccgaatcgccgaggccagctttccgaatctggaactgtggatcaggaaggcgtcgccggtgaaggtaaagctctgcgcggtaatgtagggatagggtgtgtcatgcaccgcgacccggcagatcagctcgttccggaggaaggcctcgatggccggccagtcggtccaggccaggtcggtccggcgcatttcgttgtgaaggtaggcgggtgtcgtggtcgtcatggtctcgtctgctgatggttctgaaaatgccgcatctgcgcgcgtccgggccccaaaccaattccgcgcaagggccggccaatggcatccgccagccattcaagcagggcttccagttgcggaggcaggggggaagtggcatccctcgggatggtgtcttcggcaaaggcaggaaaccgcaccacgcgctggccaccggtgtcagtggcgccggcaacgaccgggatgcagcgctcgcgcgtgcggtcaaaggccgccaggctgtcgcacttgttcagatacacctcgtcaaccccgcattgccgtacagcaagccggagctgcgccacgtcaagcagccctacccgccgtggccggccggttccggtgccgtactcattcgacagcatccggatcgccacgccgatggagaattcgtccgcttcggcgagcaaagccagcggatccagcctggccgcctcgtcggccccgccgcggccctcccgcgccgcatcggcgcaataggcctcggatcgccctgcgccaagttcggttggcaacggcccgctgccgacccgggatacgatcgccttggcgacgccgatggtcttgcggtgatacttgcatgggaggtcgccacccacatacgcgtaagaaggcatcgtatggctggacgtgacccaaggctgaacgccctgcaccacatcgagcatgacggactgcgcgccctcgaagagcacattggcacccgcttcgacccgccgcaagagcgcaaccggatcgtccgtcacgaacggctcaaccaccttccacgcctggcgcatcgcgttcaccacggccacaagaccctcgccgtcgccgtcgcgctgcacggccagccgcatcatctgctcgaacacccggctcccgtcaaccaccaggtcgcggagctgaaacgaagatcgctcccctccccgcacgcgggtcgcgagatccgcataacacgggccgatgccgttgccggtggtgccaatctgggcgccatcgtggcgatcggccaggacatggagaggctggacgaccggacacctgtcactgatcgtcaaccgcccgcccagatcgatcccctgcgccgcgagcatctcgatttcggctgccagttgctgcaacccgatcacgcagcctgagccgatgtagagcgcaacgccgggatgcagcaccccggaggggacctgccgtagccgcaaggttccgtcaggcgtggcgatggtatgcccggcgttcgcgccgccattgaagcgcgcaatcacctcgtactcgccggcgaggtgatcgacgacccgcgccttcccctcatcgccatattgcagtccgaccaggacgtcggcgtaccccgcctttttcgcggtgcccatcgcctacgcgtccagcgcaaatgtcgcctcgatctccaccggggcaccgaagggaaggctcgccacgccgagcgccaggcgggcatggcgccctctctcttcaaagatccggttcagcaattccgacgctgcattgatcaccagcggcgcatcatggaaacccggctccgccgcaacatagcctccaacgcggacgatgccccggattcgttcgaaatccccatcggtcgctgccgccacccaacccagcaggttggccaggcacaaccgcgcggcctgctgtgccgcttcgacggtgactgcgcccgggaccttgccgacgaagaccggcttgccgtcctgaagcggcaactgccccgataccgtcagcaaaccatggtgcagggtgtaagggacatagtgcgccttgggaaattccgtggcaggcaagacaatgccggcagcctggatacgatccatcactgacatactgactcctcgacttgaaaaagtgtcggcgaagtgagcacggtgcgggcctccgccgacaccacgactgtgccgcacagttaagccttagattcgcgtggcgacgccagttgatgtcgcgcagacgccaacctgccggctggcgcctagtcgccagccatgtccctgaagtattcggtcggcgtcatgcccagcgcacgcctgaacatggcactgaaggcacttggactctcatagccaagttgcagcgcgatgtccgtgacatggcagccctcggcaagcaggcgtaccgcggccatcagccgggcctgctgcttccagcggctgtaggtcatgcccgtttcttcgggaaacaggcggatgatggtgcgctcgctggcgccgaccgaacggctccacgccgccacggaagtctcatcggcagggtcctcgaggatctttgcgcagatcttgctcagccgagggtccttgggcatcggcagatgcagcggcaccacggaaagcgggcgcagttcctgcagcagaagctgcaccaccaggccgtcgcggccgctttcgtcatagtccagcggcatgcgcacggcggccgatatcagttcgcgcagcagcggcggcacagcgacgacacaacagttgcgcaactcatcaggaatggcatcagcgcgaatatagaccgtgcgcatttccacatcgccgcaggcctgcatggcgtgctcgacgttgcacggaacccagaccgcgcgttgaggcggcaccacccaggagccgaaatcggtggtcaccaggatagcgcccacataggcgtagatcagctggccacgcgggtgggaatgcgcggagatatagaagccgtccttcagcttgcgcgccatcccgcccactcgccggtctatcgcctggtagtcatcccggttttcgctctttccaaacatggcgtctttgcgatagtcgttgtcatccaggggcgcgcgcagccacacgccgatacgtatctttggccggacgccaaatgcgtcgcaacgatcaaatggaatcgaggcatcggtcccacagtctggagccaaaagtaatgtcagtgtatcgaaacttcaatcaggaagaactggacaagcagtacaacgtcagggcgggaattcccgggttccaggacatcttcaagggatgggagaacaccagcgccgcattccgtcgcgcccatcccgtaaaggagaaccttgcgtatggcctggacgccaagcaggcgctggacttctttcccgcagccaccaggagccgtccgttgctcgtcttcattcatggcggctactggcaatcgctggacaagtcggacttcagccacgttgccgccccgtacctgaagcacgacatcaacgtcgccgtggtgaactaccggctcgccccggaggtcgggatggccgagatcgtccgcgataatcgcgacgccgtggcatggctctacggcaatgcggccgaactggggttcgatgcgaaccgcatctatgtatccggccactcagccggcggacatctcaccgccacgctggcaggaaccgattgggagtcgttcggcctccccgctgacgtgctcaagggcggatgcgcgatcagcggcctgtatgacctggaacctatccgcctgtgctatctcaacaaggtggtcggcctgaccgaggcggatgtcgccagctacagcccgattcatcatgttccacgagtgaaattgcccatgatcctgaccgctggcggggatgagtcgccggagtaccaccggctgcagcgcgaataccaggcgctgctgggcgaatgcggctttgacgtgcaggtggtggtgcaggagcgcggccatcatttcgacgcggtcgacctgctgggcgatgccgatggcgccctggccgcgtcggtgttgcgcatgatcgagcgcgcctgaggcctgagggccggatcgcgggcagggcggcattcagcataggccgccatgtccgcggtcccggtgcaatcaccggatcggggcgcttgcctgcacggttgtgaaagcgcgaactcgtgatcagaagattccatggcgtggcaaaccacgcgctaccccaccctcttccggtcgctgactaccaccagcgcctgtgccagggtcttgccaatcgagcgcgagcgatgcgggatcgatgcgttgaaatacagcgagtcgccagcccgcatccgtaccgtgcggtcatcgaacagcacctccatctcgcccgatacgacgaagatcagctcttcgccggcatggctggccattggctggtcttgtgccagcgtgaacggcggcaccatgacgaagggctgcatcgccttgtccacgcgctccgtggcaatggcttcgtaggtatagccctggcgctcggcggacgggctgaacggaacccggtccgcggccttgaccagcaggatctcattgccgcgctgcggcttggcgatcagctggtcgacggtcacgtcgagggcctcggccagcttgagcaccgtaccgatggtcggcgacgacaggccgcgctccagcttggacaggtagctcttggtcagcgatgcccgttgcgccagttcctcaagcgtcagcccgttgagcttgcgcagtgccgccagccgttcggcgatggtcgaaagagcggccggagcgcccgattcttgcttcctgatcatccgcagtcactggttagaagcgcccggacaggcgcatgggtcggctcggattgtaaggtcggcacgacacatcggcaactcggtttgcctaaatgacacttcggtgtcattatagacacacttgtttccccacccgcccccgaaggagcatgcaagtgagtcccaagcgcccccatctcgcaggtgcagcagccctgtttgtcaccctcttcctcagtggtttgcctgctgcccacgcggccggctatccggatcgtcccattacgctggtggtgccattcggcgccggcggcatcactgacctggtggcacgcgccaccggcaaggccctgtctgaacagcttggccagtcgatcgtcgtggaaaaccgccccggcgcgggcggcaacatcgcggcagatttcgtacgtcgtgcccggcccgatggctacacactgatgtttgccaccgtgggcgtccttgcggtcaatccgcatacggacgtcaaggtcagctttgatagcgcgaaggacttcacctatatctcgctcgtcggttccacgccccatctggtggtggtcggcgccgacgtcccggccaggacgctgcccgaactgatcaagctcgcgcaacgccagcccggcgccgtcagcgtaggcaccgcaggcgtcggcagctcgccgtaccagggcatgcgcgtgctgcaggacgcggcccgggccgaattcctgcacgtaccgttcaagagcggcgctgaatcggtgaccaacgttgtctcggggcaggtcaacatgacattcgaggccacgccgcaggtgatgccattcgtcgcctccggcaagctgcgggcgttggccgttgccaatccgcggcggctggccaccgcgccggacgtgccggcgacaccggaactgggcctgccgaccatcgtgtccggttcggtggcaggcctgattgcgcctgccggccttgatgccgccatcgtgaagaagctcaacacagccattgccggcgtggtatcgaaccccaagttcaaggccacgctgatggcacagggcactgaaccgatgtcatcgtcgcccgaacaattccgcaagctgatcaaagaagaagaccagcgctggtcggccttgctcaaggctgacaacaagaccaggtaacgcggactgaaagctccccttctccagcacaacgaaaggaaaatcccatggccagcaccatgcaactgagcaagagcgaaatcgtcgccgcctcgctccagaaaatccagatggaactgcgcacgcagaaaatgccgctgcgcgaggcagtagccgaaacctgccggatcctgttcgccttcgggcacgactccggcctctcaggccagatcaccgcgcgcgcagaacagcctggcacctactggacccagcgcctgggtctgggcttcgacgaaatcacgtccgacaacctgctgctcgtcaacgaagacctggaagtcctggaaggcagcggcatgccgaacccggccaaccgcttccattcctggctctaccgtgcgcgtccggacctgaactgcattgtccattcgcacgcgccgcacgcctcggcgctggcgatgctggaggtgccgctggtcatttcgcatatggacacgtgcgtgctctacgaccagtgcgcgttccttgagaaatggcctggcattcctgtcggcaatgaagagggagaaatcatctcgggagcccttggtgacaagaaggccatcctgttgtcccaccacggcctgctggtggccggtgccacggtggaagaagcctgcgtactgggtgtgatgttcgagcgtgccgcccggctgcaactgctggccatggcggcgggcccgatccagccgatcccgcacgatctgggctgcgaagcgcagcgctgggtcagcacccaaaagcggttcgaagctacctttgcctactactcgcggcgtgcgcgtcgcgggctgggcgccgaatagcaacagggcgccgacgggccggcgcaagcacggccaggacatggcgaagtctgcagtctgctgagaacctgaaccacgcctggccctgcgccattgccgcttgcttgatatgagaagcgcaagctccgacagtattggtcgaatgggataatcgcgtcatggcaggcagggcgggaatcgcagatctgccgccgatggcgcaggtgagtgacggcgccatagccggcgcccgccgccggcgctcatatccctacccaagaacggagacatgccttgaccattaaaaaccgattcaccctgggcctgttggcaacggcagccctcatcgcggcggccccggcttgcgcacaagaacagtggccagcaaagacgatccgctttgtcgtgccctttgccgccggcggcgccaatgacctgatggcgcgcgccgcggccgagggcgcaaccaaggcgctgggccagaccgtgctgatcgagaaccggcccggcgcgggcggcaccgtgggcgccgacatcgtggccaagagcgcgccggatggctataccttcctgatcagcgcagccggcgtcatctccaacagcatgatcaagaagtcaatgccgttcaaggatgacgcgctggttcccgtggccatgatcggccttgcgccttcggtcatcgtggtgccgaagaacgcgccctacaaggatctgcgcgacttcgtcgaggcctcaaagaaggggaacggtttcaacttcgcgaccgcggggaccggcagcaccccgcacttcgtggcggagatcctgaatgtgaagtacggcgcaaagctgcagccggtgccctacaagagcgggtcggaaagcactacggcagtgctgggcggccaggtggaaggaacctccgaggccagcatcatcgcccttccgcatatcctgcacgatggcaagttcaaggcgctcgccaccacctggacgcagcgcatctcggcctacccgcagctttccaccgcggtggagcaaggcttcccggacctgcagatcgcgcattgggccggcgtccatgcccccaaggggacgcccgacgccatcctggacaaggtggccgccgcggtggacaaggccatgaaggacccggccgccgccgccaagctgaaggccgtgggcatcgaaccggtcggcggcacgcgtgcggacttcgtgaagtttgtcgaggcggagcgcaagcggctgggcgagattgtcaaggccgccaggatgcaggagaagtaatcgctgtgcccgccatgccgccccatcggtcaggacgccggggcggcacggctttcattggccgttgccgcaggcaggttgcggcgcccccagttctctgcctgccgctccaggtgcaggcggataaagtccatcagcgttcgcgttgccagcgtgggatagcggtttggcgcggtcagcatgtagacactgtcgcccacgccttcggcttcgcactcggccagcacctcgcgcatctgtccggactgcagttgccgccagaccgcatagcgcggcagcagcgccacgcccagcccgcccatcaccgactcgaacaggaacggatagtcgcctgactggatccggggcgacacgcgcagcgtcatcggcgtgcccgccagccataccttcagcgtaaagcggcgccccagcgatgccggggcaatcatgtcgcagcgctccaggtcggccacggtccggatcggcccgtggctgtccaggaacgaggccgacgcgcacaggcaccagccgacatcgcagatgcgcctcgccacgtggtcatcgggcggctgcgaggtgatcttcagcgccacgtcgacctcggccgggatcaggtcgccaatgttgtcgttgatgacgacgcgcagcgaaatctgcgggtagttgcgcgcgaattccagcagcaatggggtcaggtagagatgacccagtcccgtgggcaggcgaatacgcacgtcgccgcgcaccacctggccaaggctgtcgatcgaggtattggccgactgcagttcgtccagcatgcgcaagccatgcgcgtacagcaactggcccgcctcggtcagttcgacatggcgcgtggtgcggcgcatcaactgggcgcccaggtgctgctccagtaatttcaggcggcgcgatacgttggagcgggtcatgccgctgcgctccgcggcggcggtcagcgtgcgcgactcgaccatggtcacgaacagccgcaccaggttgagatcgaaattattgtcaatcatgagtcaacaccgtaggcacaaatcgagggattgtcctggcaggaagccaaccctagcataaacctcctgcttacccacctttcgaacgccatgtccgcactgcccgcttccgacctgtccgacaccgacctgcctttcgccggcctgcgcgtgctcgacatcagccagggcattgccggcccgtattgcgcgcacatcctgtggcagcaaggcgctggaatcgtcaaggtcgagccgcccgcgggcgactggggccgcaaggtcggggtcgtgcgcggcgataccagcgcgctggcgatcgcctataacgccggcaagcgcagcgcctgcatcgacgccaccactgacgccggcaaggaggtgctgctcggccttgcgctgcaggcggacatcgtcgtgcagaacttccgccctcaagtggcggaacggctgggcgtgggctatgcggcgctggccgcgcagcggccagcgctgatctatgtgtcgatcagcggctatggcccggatggtccctatgccgactatccggcttcggactcggtgatgcaggccgactccgggctgatgttcgccaaccgtggcgccgacggtggcgcgcgccgcatcggcatgctgctcgccgacgccgccaccggcctctatgccgcccaggcctgcgccgcggcgctgtgccggcgttttcgcagcgggctcggcggccatgtcgagctgaacctgttcgatgcctgctgtgcgctgcaggccaacaacctgctcgagcatgccatcggtggtccgacggccgccggcccggtgagcgcgcccaatggcgtctatgccagcagcgacggcagcgtgacgctgctggcgctgaacaacgcgcagttcgccaagctatgccatgcgctggaccgcaccggctggctggaagacccgcgctttgccgacaatgccgcgcgcatggcccacgccgcgctgctgaaccagcaggtggccgagcagatcgccacgcgcacgaccgcgcaatggcaagacatcctcagccggcacgacgtgctgcatgccccggtgcgcagctatgacgacgtgctggcgcacccgcaggcggcataccggcagaccttccagacgatcgcgcagccggggctcggaccgctgcccttcgccggcatcccggcgcgcgacatgcgccgggatgccggcccggcgccggccaacggcgaacataccgtgcaggtcctgcgcgaggccggcttcggccagcaggccatcgacgcatggctgcagcagggtgtggtgcgacaggcgacggcccccgcggccaaggcaggtgtgcaatgaaggcgcttgtctgcaagcagttcggcggcgtgcaggacgtggcgctgcaggccatcccggaaccggtgctggccgacccgcatgcggtcacgattgccgtcgagtacgccagcgtcagccacgccaccggcctgatgatcgccggccagtaccagcgccggcccccgttgcccttcgtgcccggtaccgaagcggtcggccgcgtggtggcctgcggtgacgcgtgcacgcggctgcgtcccggcgaccgggtggtggcgatcgcggactggggctgctttgccgaacaggtcaccgtgcccgagtacaccgtctaccgcgtcccggatgcgctgccgtcaaaggccgcgctgccgatcccgatttcctatggcacggcgtattgcgggctggtgtggcgctgcgcgctgcgcccgaatgacacggtgctggtgcttggcgccggggccggtgtcggcctggctgccgtggaaattgcgcgccagctcggcgccaccgtcatcgcctgcgccagcaccgaggccaagcgtgccgacgcgctgcggcgcggcgccacgcacgcgctggccccggcggacctggcggcatcggtcaaggcgctgacgcacggccgtggcgcggacgtagtggtggacccggtcggcggcgacctgttcaaccaggccctgcgtgcggcggcggcgaacgcgcgcatcctcagcatcggctttgccagcggcaccatcccgcaggccccggtcaacctgctgctggtcaagaacctcacgctgcacgggttcttctttggccgctacatcggctggacgcccgccaacgagcgggccgagcatgcaacggcgctgcaggaggtcatggcgacgctgttcgattgggccgcgcggggcaagctggagccgaccgtatccgcggtctatccgatcaccggcctggacgacgccctggccgcgctggaatcccgccaggtggtgggcaaggtagccataaaaatcaaggagacagagacgtgaacaaccgataccagaaacgacttccggcttggccgcggctgcgcgcggcactgatgctggcggcagccgcggccgcgctgccggctgccgccgtcgcgcaggacttcccgcagcatcccgtgcgcatggtgctgccctaccccgccggcgggcccaccgacctgctcgcgcgcgtggtcgcggtcaagatgggcgagagcctgggccagagcgtggtggtcgacaacaaacccggcgccagcggcatgatcggcgccgaagccgtggcgcgcgctcccgccgacggctacaccatcctggccaatgcctcgctgcatgtgatcaaccccagcattcagccgaagatgcgctatgactccttcaaggacttcgtgccgatcacgcagctggccgacgtgccgctggtgctggtggtcaacaacgcctcgccggtgaagacagtgcaggacctgatcgcctacgcaaatagccagggcggtgcgctcaacttcggctcggcgggcaatgcctcggcccagcacctggccggcgaatcgttcaagctggcggcaaaggtgccgatgcagcatgtgccgtacaagggcagcgcgccggcgctgacggacctgatgggcggccagatccagctgatgtttgattccatgccgtcggcgatgcccttcatcaagtccggcaagctgcgtgccgttgccgtgaccaccgcgcggcgcgcgagcgcgctgccaaacgtgcccaccgtcgccgagtccggcctgcccggcttcgacatcagcacctggtatgggctgtgggcgccgcgcggcacgccggccccggtcgtggaaaagctggccgcgcatgcggccggcgcgctgaagcggcccgatgtgcgccagcaatatgccgacatgggcgccgagccggtcggctcctcacctggcgactttgcccgctacaacgcttccgaaggcaaaaaatgggcggaaatcgtgcggcgctcgggggccaaggcagaccagtagcgcacggcggttgccgcaggactggccgatgccgggtgtcggccagacgcgcagttggccaatctttcagattgctgcgatcaatttccggtcggaaccgtccagtcctccaccaccaggccagggacgcgccggaatgcctggtcattggtcaccagcaccgcgccagtctccagcgcgtgcgcggcgatcagcaggttcagtgcccccaccggctgtccttgggattccagcgcagcgcgggtttcaccatagccggccatcactgaaggggtccagggcaatacctcgaccctgcgcagcaactcgtcgaccgcgcgcgcgaggcgcgctgcgccgggacgcttggccagcccgtacatcagttccgcaccggtgatggctgacaggcacagcgccaccatcggcgctgccgtcacgcgtgccacgactgccggatgtgcccgcaacagaaggctcacgatattggtgtcgagcatgtagcgcgtcattcgagacccgccagcggatccctggcttgctcgccctgcgcgcggtcggccataaagtcttccggcacggcgctgtccttgatggcagccaaaaagccgtcccaactctccggccggcgcgacaggatcacgtcaccggtggacgggtcacggcgaatatatacctcgcgctcggcgaagcggaattcctgcggcagccgtaccgcctggctgcggccggtggtgaagatcttggcagtggtgctcacgatatttcctttgatagataccaaaagatataccgtcatgcgatggatatcaagatagctaccactagctgtatctgtgggatgtctaacgagatgggacgaaaaatgcgctaagcaacacctacgtcccagcaatgcttcgtcccttgttttgctctgcggcgcaccgcaaccgtgcacccatgcgcccggattgagcacgggctccccctcatttccccagcgcccattcaaagctacgggttttcgctcgttgaacgttggcatgtctgttgcatagtattcaagtgacttgaatatggtgcaggcagctttccaagagctttcccgggcgtccacacgcgccttgcatcggttcgggtcggtgacgccgcgcagcggtccgtccaattgtccatgcaacccagggggaagagagtgcgcaagaaacacactgcagtagccgccgccatcgcagccgcagcgaccggaatggtcctgacggcagcaccggcgcaggccaaggatgtcgtcaagattgcctttgtcggtccgctgaccggtggcgtgtcgtcgatcggcctgggcggacgcaattccgcggacctggccgtgcgcttgcgcaatgcggacccgaaggccaggtacacctatgaactggtggtgcaggacgacgagtgccggccgaacgtcggcgtgcaggtggcgaccaagatcgcggcggacaagtccatcgttgccggcgtgacgcacttctgctctgccgtggccatgggcacagtgggcgtctacagccgcttcggcatgcccgccgtggtgtggggcgccgtgctgcccgaggtcacctatggcaacaagttcaaggagatccatcgcgtcaacggcacgatgatcaaccagagcgaagtggcggccaaattcatgaccgggctgggctacaagaagtgggcgatcatccatgacaccaccgactacggcaagggccacaacaagtatttcagcgagttcctgaagaaggacggcggcaccatcgtcggcacgttcggcgtgacagccgatcagcaagatttcaccacggagctgaccaagatccgcgaactgaagcccgacgtggtgtattttggcggcctcacgccgctgggcgtgcgcatccgcacgcagatggacaagctcggcatcaaggctcagttcgagggcacgtcgggcatcaagtccgatgcctatatcgaaggcgtgggcaaatcgctgtcggagggttcgctggcgttcatcgaaggcgcgccggtagagaagctggcgggcggccagttcttcatggaacgctacacgcagcagaaatacggtgaaccgccggaagcgtacggcccgtttgcgtttgccgcggccaacctgatcatcgacgccgtggaaaaggtgggcccggaccgcaagaaggtgcgtgatgtgctgaacggcaccagggacgtgaacaccatcatcggcaaggtcaccttcgacgaccacggccagaacgtggtgccgctgatcaccaagtatgtggtggaagacggcaagtgggtgatctgggaagacagcacctacggcaagggcaagaagaagctgaccggcctgtaagcatggcggccgggttcggggcaatcctgcccccgcccggccccgcgcccgcctgggcatccggaattcgggggataccgatgagtgtattagggcagtacgtctttaacgggctgatgctcgggatgatctacgcaatggtggcggtaggcttcacgctgttcttcggcgtgctcgacgtgatcaagttttctcatggcgatgtgctgatggtgggtgcgtttgccgggctggcggcatcagccggcgtggtggcgatgcatgtggattccccgtggctgcagctgctggccatcgtggtgtgcgcggtgacggtgaccggcctgctgggcgccggcatcgcccgcgtcctgatcctgccgctgcgccgtgcgccgccgctgaacacattgctggccacgctgatgctgggcacggtgctgcgtgaggcggtccggctgttctacccggacggctcgaacccgaagccatttcccgcgctgctgcccgctggcgagttcaccatcggcgcgctctccatccgcgcggacaacctgatcctgctggccgccggcgtggccatcatcctcggcgtgcatctgctgatcacccgcacgcgctttggcatggccattcgtgccgtggcccaggatggcgaaacggcccggctgatgggcatcaacttcgaggtggtggtactggtcacgtttgcgctggggtccgccatggcggcactggcgggcgtgatgaacggcctctactacaacgagatcaacttcaacgtcgggctgctgttgggggtgatcggctttgccgctgccatccttggcgggctaggcaatatctacggcgccatcctcggcggcttcctgtttgcggcgctgcaggtactgggcagtgccatgctgccggccctggtgcccgacatcccgagcgcctacaaggacgtattcgcctttgccgtggtcatcgtgctgatggcctggaagccgaccggactcatcgcggagaaagccagtgaacgtgtctgacaacgtctcgaagccgctgccggcggcctccgccgccacggccgagggcccgcagcggcgcccggccatggtgctggccatctcggccatcgccctggtggcctatctctacttcttcctgcatgcggaatcgcaactggcggtagccgtgctgctggcgctggccggggccgcggtgttcgcggcgggccggctgggcctgacgcaggccgtggagcaggcagcatcgcggcggccagggcagtccaggctatggacgctggccggcacgctggcgctggtcgcgctgttccacgagagccatttcgtcctgctgatgctgtgtgccgtgctgctttacaccaccgcctgcctggggctgacagtccagttcgggttttccggcgtgtccaatttcgcgggcgcggcgttctttggcatcggcgcctacaccacggccgtgctggccacgcacacgggcattcctcacgtgctggtgatcgtgctgtctggcctggcagcggccgtgatcggctcggtgctggttgcgcccgtgctgcgcacgcgcggccactatgcggcgctggtgaccatcgcgttcggcatcctgttcaagaccttccttgaggtcaacgacgtgctgggcgggccgcagggcctgcaggtgcccgggatgacgctgttcggcttcgcgttcaatgagagcgtgacactgttcggcgtggacgtgtcgttctacgccagctatgcgctgctgagcctgctgatctgtgcgggcacgtttgccgtggtcaaggcgctggagcgctcgtgggtaggcctggcgatggacgtggtgcgcaccgacgagaccgccgccgccgcgttcggcctgcacatcgcccggtggaaggtgattgcgttcatgctcggcaacttctttgccggcatcgccggcagtgtctacggcatggtcactgcgttcgtggcgcccaacaacttcaccttcgccgactcgctgctgatgctgtcgatcgtgatcctgggcggcctcggcaacgtggtgggcctggtgccggcggccattatcgtgctggtgctgcccgaaaagctgcagttcatccaggaataccgcttcctgttctacgcggcgctggtgatcgccatcctgctgttccgcccggacggcctgatgccgcgcaagacccgcctgttctttccccgggaggatgcgcaatgagcgacgcaatgatccaggtgcgcgacctgaccatgcgctttggcggcctgaccgcgctggacaacctccagctcgagatccgccgtggcgagatcctgggcctgctgggccccaacggctccggcaagaccacgttcttcaacgtgctgacggggctgtacaaggcaagcgccggaaccattacctatgacggcaacaacgtcatcggcaagacgccacagcagatctaccgcagcggcgtggcgcggacgttccagcgttcgcgcttgtcgctgccgctgacggtgttcgacaacatcgtgatcggcgattaccagaacatgcgtcacgggctggtcttcaacctgttccggcgcaaggcgttccgcgccgagtacgaacgctacgtggagtcggtgcgcgagctgctgggcatcttcagcccgccactggtggcgcggctgttcgagccggtggaaacgttcacgatgatcgaccgccgccgcatcgaggtgtgccgggccctgatgagccgccctcgcctgctgctgctcgacgagccttcggcgggcatgacgcatgacgagacccatgaactgatggacgacatcctgcaggtgcgcggcaagctgcaggacctgtcggtggtgctgatcgagcacgaaatgaacgtgatcgagcgcatcaccgaccgctgcatcgtgctgaactacggcaagaagattgccgagggaacctacgccgagattaccgccgatcccgacgtgcagaccgcctatctgggggaggaagccgcatgagcgacagcacactgcgcgtggaagggctgaccacgggctacgacagggtcaacgtcctgcacgatgtctcgatcgaggtgccgccgggcaagatcacatgcatccttggcgccaacggcgccggcaagagcacgctgatccgttcgatcctgggcctgacaccgccgcgccagggacgcatcctgtgggacggcacggacatcgcgggcgagaagacccacaacatcatcgcacgcggcatctcctgcattcccgaaggccgcaaggtgttcccgcgcatgacggtggccgaaaaccttgcgctgggcgcattccttgaggcggacccggccagggtgcgcgagcgcatcgagcgcgtgtacacgatcttcccccggctgcgcgagcgcgcgggccagctcgccggcaccatgtccggcggcgaacaggcgatggtgtcgatcgggcgcggactgatggcgcagccgcggctgctggtcatcgacgagccgtcgctgggcctgtcgccgctctatgtgaaggaaaacttcaaggtcatccagcagatcaacgaactgggcatgacggtgctgctggtggaacagaacgcgcgccagacgctggccatctcacaccagggctatgtgctgacccagggccgtgtcgtggcccagggcaccgcgcaggcgctgcgcgagaacgatgaggttcgcgcagcctatttcggctgatccggagaacatgcgatggacgacttcctcgatcttccggtccgcacgctggcggcgatggtgtcgcggcgcgaactgagcgccgaagcggtggtccgtgcggcactggcccgcattgcggcgcaagacgcaggcattctggcctggcagcacgtgggtggcgacaccgccgtggcgcaggcgcggcggctggatgccggcggcgcgtcaggcgcgttgccgggcgtcccgcttggcgccaaggacctgatggatacagccgacatgccgaccacttatggttcgccgatatacgccggacatcggccgggcgtggatgcggcggcggtggcactggcccgatcggcgggcgcggtcgtggtcggcaagaccgtcaccaccgaattcgccacgtttcagccggggccgacccgcaacccgcgcgcgccggcggacaggccccgcacccccggcggctcgtcgagcggatcggccgccgccgtcgccgcaggcatggtgccgctggccttcggcacacagaccgcgggatcgattgtgcggccggccgcctattgcggcgtggtgggctacaagcccacgcatggcacactgccgctggccggtatcaagccgctggcaccaagcctggatacggtgggcgtgctggcccgccgcgtggacgacgcggccttcttcatcggcaccctggcgcgcgatgccgcgctagcggacgcgtcgacgctacgccacgcgccgctgcgcatcggcatttgccgcacgccgcattgggaacgtgctggtgccgatacacaagccgcactggacaccgcgatccgtgcgctcgaacgcatcggtggcacggtgcgcgacttcaacctgccgcaggcttgccacgggctgactgaagcccaactggacatcatggcattcgaggcactcgccgcattcgcgccggaagcacgcgagcacgcagaagacttcagcgcggctttcgcgcgccagctcgaagcgggccgcgccgtcaccggccagcgcttccatgtcgcgctggcatacgcggaagcggcccgcacggcgttcaacacggcgatggcaggattcgacgtcgtgctggccccgagcgccgaaggcgaagcgcctgctggccttggcgccaccggcgatccgattttctgccgcatgtggtcgctgctgggcaccccatgcgtccatgtgccgacgggcaccggcgccaccggcatgccggttggcgtgaccgtgacggggccgcgccatgccgatgcccgcgtgctcggcatggctcatcgccttgagcaggcgcttggcgccagccttgcctgatatctggagaccaaattgaccgtatcgaacccgccccccctcgccaacgcacaagccattgccgaacgcgcacaggatcatgtgggcgccgggcgcctggccgcatcgctggcagccctggccagctttggcctgcgccacgacggcggcgtttcccgcgaaacactgaccgcgaccgacctggccgcccggcgccacctgatcgaccaggcacgcgcgctgggctgcaccgtcggcatcgacgattgcggcaacctgttcttccgccgccccggccgcgaagacctgccgccggtgctgaccggcagccacgccgatacccagccggtgggcggcaagtacgacggcgcgtacggcgtgctggccggcctggaagtgattgccgcgctcaacgcggccggcatcgagaccttgcgccccatcgaggtcgtgtcctggaccaacgaggaaggcagccgcttcggtcccggcgcgatggggtcgagcgctttcgtcgaacccgcccggctggcaggctatcgcgacgtggctgacgccgccggcattcgcttcggcgaggcgctcgatgccgcgctcgcggaaagccacgatgtcaccagagtgccgatggcgcggcccatggcggcatgcgtcgaactgcacatcgaacaggggccggtgctggaaggcgcaaatgtgccgctgggcgtggtcaccggcatccaggcggtgcgctggttccgcgtggaatgcacgggtacgatggcccatgccggcaccacgccgatggcggtacgatgcgatgcgatggccgcggccgtggccatcgcgcaagacctgtacgcgctggcgccgcgccatgcggccacccccggcactcctgaactgcgcctgacgctgggccgctggagcgtggcgccgaactcggtcaacaccattcccggccacgtcacgttcacggtcgatatgcgctgcctggacgacgccgcgcttgaccgcgccgaagcggcactgcgcgcggtgtgcgtcaggcacgcacatgcgcccgaagcggtcacggtcacgcgcttcttccatcgcgagccgacgcatttccccgaggccatgctgggcaccatcgagcgcgcctgcgcgcgtgccagccgcaacgccggccgcgcgctgccggtgcggctgacctccggcgcgttccacgacgccatgtacctggccgaccattgccccacggcgatgatcttcgtgccaagcaaagggggcatcagccacaatgccgccgaagatacggaaggcgccgatctgttccttggagcccaggcactggcttacactgtcgccgaactggccagccgctgaacgcattgacgtacggcgcctggtggccgacccaagtccaaccaattccgagcctgcatggcaaagaccgagcaacccacacctgaagcggccgacagcaagtcggccaccctgacgcttggcgtcaagctgcgccacgcccggctggtggccggctacacgctgctgcagctcgccggaaaggcgggttgctcggaaagcctgatttcaaagattgagcgcgggctggcaaccccgtcgtttaccacgctgcaccggctggccgtggcgctggacaccaatatcggcgcgctgaccagcgacgaggagccaaaccagtcaccgatcctgcggcatggtgaacgcccggtgatccgggccggcggcgtggcgctcgaacgcgtggtgctgcccaagcgtggcggcctgctgcaggccaacatccacatcgtctggcccggcgaggccagcgacgggcagatcgagcaccagggcgaggaagttggctacgtgctcgaagggcagctcgaactgatgctcggcgacgacgtctacctgatcggcccgggcgatgctttcacgttctccagccaggtgccgcatggctaccgcaatgtgggcgacgtggtggccagggtgctgtgggtgaattcgcccgccaccttctgagacgggagcgggcttgcgcagggaagcccgtggctcgggtcaggcccgcacgaaggcagacttggctcagagccccgacggcttcaatcgtcatcgtgccagcggtgccactcgcgatggcgccgcctccactcgcgttccctccaccgctgctcgcgccactgttgttcacgccatgcgcgtgcctgccaatcgtcgtagtaatcaggcgccactaccaccgggcgcggagcaacgtagacaggggccggttcgtagtacaccgggggcggaggcgctgcaaccacgacacctggaataccgatgccaattccgacgtctacccttgcctgggcggcgccagacgcaagcatggatgcgactgcgattgcacaaactgccaggatcttctgcatgatgctgttccgtcgaatgttgccaataccttatggcgttctcgccctgtttggtatgtgcagaacctaaagctggttacctcgtgtaacggcggcaggttgtgacagttgaccacggcgcttgagagtcttgtaaggctttgtatccactgcgaagtcagaggctgtcgcatcaatccttgttacggtctctgccgcgaccgttgccaccgtcggcgtcacgattccgcccacggtcatcaccgcggttaccgccacggtcattgccccggtccccgccatgctctccgcgccggtcccggccgcgattctctgctcgctcatcgccccggttccatccacgcttctcgccgcggttttcgccttggtctccaccacggttccagccgcggttatcacggccgctccagtcacggcccctgtttcgctgctcgtcccggtcccagcctcgatcccagtcaccgccccactttcggttgccgccgtagtaccttccgccgtcccaatcggagtaaccgccgccgtaaatcggacgcgagtatccgccgtggtagtagccgtcatcatagggagcgacggcgcagccggtgagaagtgctgccgtgaccacggtgagcacaaataggggtttcatggtgacctgcgcttgcagttggcgaatttgccgcaaggataccgacgggcacctcccccggttgtaagaaatcgtgtcccgagcgcgaagtcgccgatgacggcagcaccgatcgtcaacgtgcctgagatggcgagccagtcggtgcagggatcgaaacgatttggggtagccgcatggggctacaagccggtcttagtgttctcgacgcatgcttttgcgtaagcgattgcttcggtcattgcctcgccctcgctattgaacgaggctttgatcttgtgccgcaagcctgggacaaactcgtttgcgtgatcgattcttcgctcgaacaataccgatgcctcccaggtcccggacttagacttccagaccgtgcagtggcagtagtactccccttcttcgacccagacatggctcgacatggcgacctcccagcgtttcgaggcatcctagcatgacgaaagaacgcaccatccggcatcaactgcggcggcgcataggtgccaatccgtgggtctgggtgggcgatttcagaggggttcagccgtgatcatctacccacgctttcgcccaggcaatgccggctgccgcggcacgctcaaacgaggggtagtaccccaagggatccgatccttcttcgatgcggccgtccttctcaactgcaccggatgcctcgaaggatccgtcgccaagctgctttgcaaagccgcggacgatgtagccctggtagctttcgattgtcatgacgacctccgacttagataggaaaatcgtagcatgaagaaactggtcaacccgaccctctgacagaaatggggttcacccgccatagggacgatacacttgcaagctcgggctatatcaaactcacgcttggaggaaccacgatggcaaagctagtggtgctatacaagaagcctgcggacacggcggcgtttgattcatattacttctcgacccatgttccgatcgccaagaagatcgccggcctgcgacgctacgaggtcagcagcggcccggttgcaagcccggccggcgattcgccgtttcacctggttgcggtgctgagcttcgattcgctggcggcgctccagcaggcaatggcttcgcctgagggcgccgcagcagcagctgacctggccaattttgcccaggccggggttgacatgctcatcttcgacacgaaggaagtttaggccggcggcggtgcaaagcacatggccgcccccagcgctccgcctcttctggcctcccaagagccaaagccgacttaatttgcagctgcctttgaggcctgtgctgcgcgacgttgcatgcctttcgaggccacctgcgcagcagtattgaagctgctctcggccgcttgcacggcctgttttgccgtcgtttgcatcgactcatagagcgtagtggtcgcgctgacggcctcctgccaggcagccaatggcgccgccgccgcgccgctgggcgtttggctcaccacgcttccaaggaagtcgtgcagaccctgcttgcctgccgtgtactggacctcggcgaccttctcgaactccgcccgggtggcggcgaggatgtcgtacagttgacgacgatatgccagtacattgtcggccgcgggttgaaataacgcgatttgcaattcaaccaattcttgcgggtccttggctgagagcgctttccttgcgccttctcgtgaatcagccagcgccgtcttcatcgcttgcagattcagctccagcagtttttcgaagccttcaaaggccttgccggtcagcccggtcagggcttcaatgcctgccatctggaccttaatgaattgctcgggggaccactgagtcatcttgcgtctcctaagtgcgacccgccacctgagctatccgatgagagctccgacgggaccggaatcgagtggaaaacaattgctgcatcgtgaccctggcaggccacgccgatcagacgaaagcgcgccaacgccggcagtcgcttccagctaaagcaatacgctcataaggaggcctggcgagcctgaccctcgcttgcgcgaactcgcccgagggctttcagaaaagcgtagccctggattgtcacctgagggcggctgtggtttggcccaaggcgctcaagcgtaaccagtttatacgcgagcagcgcgtccatatccgcgcggtccagccccgttgggtcggagctgccgcttaccagcacaagcgtggcgaattcatgatgactcagcacagtcgtctcccaagctgtaggtttacttttgctacgggacttcactactgtccgtgacagccggcctggtttgcacaggccgcttgtttcgtctcggacgcgaggttctggctggcgggtgcttgttttcgcacccggaacgttcatcttagttgctcgccaccttgtgttcaatgtgattgcaagcatgtttgccgtaatccccggtattttctcctttaccaaaacgtgcgcaggggcagatcaacgaatatcgcaacatgacatacattcaggttcgggagcaccattcgccgaccgaccggacggcttgcattagcgcaactcgccgaggtccgctaccgatatgtcgctgctggggaaaggcatggagcttcaggccgaatgaggaccgctctgcgtcaaaaaaaacgcgtcgccggagtggtgacgcgggtggtagtagcaggacttcagggcgattctatattgacttagatttttcttacgtcagaattaagcaagaccttgactctccagatctgaagccaaggggcaaggtgagcagggcaacgctgagttgaattcagtagcacattgaatcagaccggcaaccccgcgcgggatggtgtgagtggaggcagaaatgacaacggctcgggctggaaccaaaggggaagccatcaggctcctggaggcagagggggtcgcgctggtcgagctcgactatgagtcaggttggcaagatgctattgagctcgggcgccttggtaataaggtagggatacgggtggagtaccgcggacacgaaagcattgccgtgaagtccctcgcggcgctcattgctggcctcagccggccgaaggtgtccttccggcaacggaacctgtactgccagtttgcattggaccagctggcagccaacgagttggttgccttggagacaaaggccatgaaggctggcgactacatcctggccgggcacctgctgcgggacgtcgatgccgtttggactgagtgagcctggatcgaggggattttcctcggattcggcgatcggaaatttgcgcactcagcccgtatcgcgactcgcccgcctcatcatcagcgctctgatccagaggttaacccgcagatgctgcccgccctcctcttcggtatgctaggggttcggcgcgccgtaacgcatccaaccatattttggcgacggggcgattctggggcgggacttctcagcacgcaacctgtgtgcaccaaatgtcgaggacgagatggcgactggcatcgtgaagtggtttaacagtgaaaagggctatgggttcatcacgccggatgatggtggcaaggacttgtttgcccaccacagcgaaatccaaggcaccgggttcaaatcgctggaggaaggtgcgagagtggaattcgaagtcacgcaaggtcagaagggcccacaagcgtcaaagattcgcccgctatagtcgacctgcccacctgacggcctgaattgacaaagccctccacgaattgcgaagggcttttctgttttgcggctggtgccagccgcatccggggggtcgctatttcctgcgccaatatcgactgacaacagcattccgggctcagcgcgacagacctcgggctcatggcgacggaggtagtcgaccaccgttgcgagttccaaacggagccgcttgccgccccgtgtaaactcctgcatcggcggatcgccaaccatcccctattgaggaagaacatgactcgacaatcacttcgtacgctgtgcctgaccctgctgctgaccgctgccaccacaccggtgctggccgatgacctgaagaacgccgtgggcggcggtctgggtggtgccgcgggcgccgccgtcggtggcgcactgggcggcagcacgggtgccgtggtcggcggtgccgtgggcggcggtgcgggcggcgcggtgactgccaacaagaaggaacgaaccggcgccatcgtgggtggcgcgctgggcggtggcgccggcgcggcggccggcaatgccttgggcggccgaaccggcggcatcgtcggtgccgcggccggtggtgcagcgggttcggcgctgggcggcaatgtgtcgcgcaacaactatgccgatgaccacaagaacggcaatcgcggcaagcacaagggccacaagaagcatcgtcacgacgactgagtgaggcgacgcgcgatggcgcccgtcacttgggcatccatcccatcgcgctcttaaccgcatcgcgcggcggcacctgcgaaagcgaatgtcgcgtccgccagcgacgacatcagaatttccagaacaggaattgccgatgctgtcgcgcatggggcttgcgaggagcccgggtctcaggactgaaccgcgcatccgggtcgatcactcgtgcgcgcagcgccatgtcgtagaacgcgcccaccatcggcagcgcgctatgcgcgccctggccccagtcgttaccgagcgtcacacgtccatcgtcaaaacccacccacgcgcccgcgaccagttgcggatgcatcaggatgaaccagccatccgcgttgtcctgcgtggtgcccgtcttgccggccacgtcggcgcgaatcccgaagcgcgtgcggatgcctgcgccggtgccgcggataatgacgtcgcgcatcacatcgacgagcgtttgcgcggcggcggcggacagtgcctgttccggcgatgcgctcgcaaattcggcgagcaccttgccgtcgtgatcctcgatccgggtaaccatgcgcggttcgacataggcaccgcggttcgcgatcgtgctgtacgccgataccatttccttgagcgtgaccgggctcgtgccgagcgcgagcgacggcaccgctgcgaggggactgtcgcgcacgcccatcgcgcgcgcgagccgtgcgaccttctcggggctttccttttgcatgagctgagcggtgacgcggttgcgcgaatacactagcgcgtcgcgcagcgtcatcggccggtcggtgggcggcgccgcatcggtaggccgccagatcgcctggccggccagtggaatggcgacgttccggtctacgatcgtatcgcctggccgcgcgccgtccgcgaacgccgccccgtagacgaatggcttgaaggtagaacccggctggcgccgggcctgctgcacgtgatcgaatggtgcatcaccgaaatcgcgactacccacccatgccttgatatcgccgttgcgcggatcgatcgcgacaaaacccgcctggacctgagtcttgctccggcagagtgcgcggacaaacgtgcgattcatgccgagcttcctgagcgcgacctgatccgattgaccagcatcgcgtgctgcacgatagtcaggcgtttgccggatgaatgtccggaacaggtcgttgcctggccaacagccagtgcgttcgttccatgccccgttcgcgatccattgcaactggctcgcctgccagtccatcgcctgcaccgccatcgtctgcagacggtaatctatggttgtgcgcacgacaagcccgtcggcatagatgttgtagccgttgcgctcggcccatgtgatcagccacttgcgcagttgcgcggaaaaatgcggcgctgcgcttcgtggcgcggtctgcaacccgaaattgacgttgagcggttgccgcctcagccaggtgtaagcgtcgggcttgagcttcccgtacttgttcatctgccctagcacagtgtttcgccgctccaatgcgcgctcgggattcagcactgggttgtaggtgctgttggccttcagcatgccgacgagtgtcgcgctctcgaggatatcgagctgatgcgccgatttgccgaaatacgtgcgtgcggccatttccacgccgtaggcgttgtacaggaacggcacattgttcaggtatgtctcaaggatctggtccttgctgtacacggcttcgatcttgagcgccgtgatcgcttccctgagcttgcgtgcgagggtcggcgcgcggccgatttcgtcgggatacaggttgcgcgcaagctgctgcgtgatcgtcgagccaccctgccggtcgccggagaacgtatgcagcgcagccgacgcggtacgcagccagtcgatcccgtgatgctcataaaagcggcgatcttcggtggcgatcaatgcagcgaccatgtacggcgagatctgcccgagcgatacccactcgcgattgaccggtttgaattcgtcgatcactctgccgtcggccgatacgatcagcgctgggcggtcgatgcgggctttgcggatgtcgccgatgcccggcgtaaacggcacgagcgccagcacgtacagcagaaacagcgccggcaccgcggcgagcgtcagcatgatgccgcgtcgcgtcgggtggccaaggcggcgcagcgcgccgggaaagacgcgcctggctatcgtgatgccggcagcggccagcgattggatgcggatgagccaccgtacgcaatactcacgaaaaaacaatatacagcggcgattcacggtggcgggacgctttgcggaaagagcggcatcgtaccaaagcggaaggaagcatctgttggcaacacggggctgcgggggcggcattaacaaacgattacatttgtttcgtacggcgcacgttcgctgcctgtgcctctggctttgcggtcatttttgcgatcaatgccggccggcggcgtattgcatgcgagcgcgcgtcggcgatccgaactcctgcgctcggtccaacatcttgtcggacagaggcggatagcactgcgacagcgttatccctaagattggctcgctcgatctggcatcttcgtgggaggcgcaaggcatgcaggacattctgattctcaccggcggaggactattgctcgccgcgatccttttccccgggctccggcgccggccaagaaagtgaacgacgcggagtcgcgactgcaattaccaagcccgtcagagccggcgactaaaggggcatgcctatcggcgaacctgccctacctggccgagcggacccataccctgcgccaacgccagcaggccgccaggcgcgctgctctgctgccagacggagaggttgctcaggcccccagccatcgccacataccgttgcgggtgagagcactcgccgacgcgctcgctgaacggcgcggacatgggaaggcgaatccgcgttgaacccatggatcgggtccggaagcctcacggcaacacccagaaggatccggaggatttcgcgctggcgctttgcccgagccatgcccgcgtccccgacgtccgagcgttctgaagggcagacagccggtcgtgatctggctcgtcagggtccgcttccggaaagcggacatccattgaattgacctctgacgcgattcagcggcccatgcggcggttgtagctgcgcgaaattcgcgccatcaacgctggatcgtgtgcagccatgccgtcgaattccacccgcacgtagccgtctgcctgctggtgcacaccggccatcaccgtcgtggtatccagactgccgacgaccacgccattgaccgggtcctcgacgctgatcgccaggccctggtcgcgcatggccccggctgctgcggtgaaggtgcgatcgaagctggccggccccatgactgtaaaggcgcctgttccggccggttccaatgtacatgccgaaagcgccagcatggcgccgctgactattagtgagagtcgcatgatgatgactccttccgctagccccggatcgaaaatgtacgcgttgcgacttcaggcgagttttccactcgctgatcgctaagacacaagattaggcgacgttggcgcatagacccagcttgccaggtgcgcgcccgcaccctgcggatgccggcctgctcacatgactaggctgcgcccgccccgcgccccgcgcgtgccaatgccagcgcaagccttgctcccacctcggcgttgtgtttcacaagcgcgatgtttgtcgccaggctgcgtccgctcgtcagcgccttgatgcgagccagcaggaaaggcgtcacggccttgccggtgattccctgcgccctggcctcggcaagcgcctgccgagtcagcgcgtcgatctccccggacgtcatcgctgccgcttgcggcaccggtgtgctcaacaccacgccgcccgccaggcccaagtcccacttggtgcggatgaagcgtgcctgctccgccgcgtcgtccagcctgaagtcagcacgaaagccgctgtcgcgcgtgtagaacgcagcaacattgtcttgctcacaactgagcaccggcacaccgtgtgtttccaggtattccagcgtgagcccgatgtccaggatggacttcgccccggcacagaccaccgccaccgaggtcctggccagttcctgcaggtcagccgagatgtcgaaggtttcctgcgcaccgcggtgcacgccgccaatcccgccggtgacgaagacctcaatgcccgccagcgcggcacatatcatcgtgccggccacggtcgtggcgccgagcccgccgccggccagcacggctggcaggtcgcggcggctcaccttgtgtgcccgctccgagcgccccagcagctccagctcgtcgttcgaaagcccgatgcggattcgcccgccaatcagcgcgatcgtcgcgggctcggctcccaggtcgcggatcagggcctccacttcacgcgccgtgcgaacgttctccgggtagggcatgccgtgggcgatgatagtggattcgagcgccacgagcgggcggccggcagcctgtgcagcggccacaggcgcgctgaaggtcaaccaggaacgggcaaggtcggcaaccatgtcgatgcattcggtggcgtgagccgcatagtgtgcagcacaaggctggtccatgagatgcaagcgcgggaccacctcaaggcgccaatggtaccgcgagcaggaatcggacggctgactctggcacccactgaatcgcctgcccgcgggtgccacctcatcacggcctggaatatcgttgtcatagccgggcggggtgctgccgggaacctcacgctgaggtatgctgccgctttcggatcgattctctccagaggggcaaatgcggcgcgtcgtgttcaatcagaagggtggggtcggaaaatcgaccattgtgtgcaatctcgcggcgatcagcgccagcgagggcttgcgcaccctggtcattgacctggatgcacaaggcaactccacccagtacctgcttggcgcgcgggccgcggaggcaagtccgaccgcggcgaatttcttcgagacctccctgacctacaacttcaggccggtggaatttacgtcctttgtccacccgacgccgttcgagaacctcgatgtgatgccggcgcatcctgacctggattccctccacggcaagctcgaatcccgctacaagatctacaagctacgcgacgccctgctcgagctggaggcagtctatgacgccatttacatcgacacgccaccggccctgaatttttatacccgctccgcactgatcgccgtggagcgctgcctgatcccgttcgattgcgatgacttctcgcgccgtgccctctacacgctgctcgataacgtgaaggaaatccaacaggaccacaacgacgggctgcaggtcgaggggatcgtgatcaaccagttccagccgcgagccagcttgccgcagaagctggtcgacgaactggtaagcgagggcctgccagtacttgaatcgcggctatctgcatcggtgaagatccgcgaatcgcatcagcatgccacccccatgatccatctggatccgcgccacaagctggcgcaggaatatgtggcgttgcaccgcgagctggctggttgaggaatcgccaaggcgcgctgagatcgatttccccacgcaatgacactgccgggcgtcagcttcctcgcggccggtcagaaccgatgccgcatccccgtggtaaccaccacctgatcgcgcccggcggaagtcgggtagccgaaaatcgccgccgtagtcgcttcgcccatagcacgctggtagcgcccggtcaggaagatgtcagtacgcctggacaggaactggtccacgaacagcggaacggaaacggaccaggctgcagcctcgggcagccggggccgcgaacagcctggcgcgcagcgcatcgaactcggcgcactgttgcccccgccacgcacggcgcgtgctgtcgtcgatccacgcggcgtccagcccgttaagcatgaactcgcgcaggtcgtccaggccaaagccgaaatcgcgcaccatcatcccccgggcctggctggcggtgacgtggtgcagcacggggtcgtcggtgttggggtgcacacgcaagcccatgcccggcatatggcggatcgggtgatcgagcgcccagcgctcgcgcggcagcgtgcgcaggtagtaggaattggtcggcaccaccgtgaagacgatgccgcggtccgcgcaacgctgcgcgaactcggggttgtcaatggcggtgtagccatggtcgatgcgatccacttgcagcaggtccagcgcggtggccacattggtccagggcgtgccgaactcgccggcgtgggcagtggtcttcagcccggcggcgcgggccttgcgataggcctcggcgaacagctcgggcggccggtcattctctcgatagtcgatgccgatgccgatcacctcgtcgcggcggtcggcgatgacccagtcgaccatctcgaccgcctcggcgggatcggcttcgcggtcgatcgacggcaccagccgccccacgatgccaaaccctgcctcggcatcgacgatcgcgcgcacgatggcttccatggcggcgcggtacggaatgccggactgtctgacggtgccggtggggttccagaagaactcgctgtagcggatgccttcggccgccgcgtcctgcaggttgcagtacagcgaatcgctctacagcctggtgtgcgcggggctcgcggtcggtctgctgtcccggctatacgcccagggcatcaacgatgtggcgctgcgtgccgtgccccctgggcagccccagcttcaagcgccgcgtggcgttgatgatgcgcaaggaaccggcgcccaggatgccggcggccgccggctgcttccgcttcctgtccggcgcgatccgctgctgagcggcgcccgtgccgtcgccaggcctgaaaagatcaaggtgtcagatcccccttcttggggggatttgcggtattgaactcttgcggtagccttcagcaactccctccggggaccaaatgcatcgcgcactctcgcgcaacgcgtcacgcacgaacagtttcaccgattgcgtcgtagtactcgcggcgtggttgccttgtcaggaatattcctgcccgtccagccccagagcatgtgaaaaacacgacggaagccatccaatgaactgcccgcgtggctgacttatgtcgcttaggtgcagtcggccaggtagttggcgggcggacagttctctccgccgccctaaacatcccggcatcctattcaactccgacggttcgtccatggaacaatggctatgaggaaatgctttaggggtgtgcttttcgcgacggtgttgccatcactcggcggatgcatcacggctggcgacttcaacaagaagatcgcagacacaggcacgacggtagtcattggctcgcctgtcagcgcttgtgcacgtgcgaaagctgaatacgccctgtccccaacgactatgccgccggccgcagtgaatgccagcttgtcgggcaaccagcgcaatcgcactgatctgcaactcgggctgagtatgctggcgtccgccacttccggaagcgctgtgccggcatcagctgcagcatacgatgatcatgtcacgggcttttcacaagggctgttcgcacgactcgggattgatccgagcggcatcgaggtcaatctcgacgctcttgcgcctgatgcagtggatcgcgccaatcaggtactgacttcgacgctgtttcgagacctggcgccagcggaccctgcggttacctcgtcgaaatttggcggcggcgaaattaccatcagccgccgtgaatggaccgggatgattcaggacgtatcgttcgccaccagcggcgaagggtgggtcggtgcggcagcgcaagcgttgggccactacgcgaagacctatggactcaaccagataacaactactacgcaggcgcaagatgccgctcaggtgacactgcggctcctcgtggcgcgctatgtgtcggattacttccggaatggaaaaatcgtcacactcgattttgactaccccgacctgaagtccaagctccttgacaagctcaagaagtcgatcaaggacgagacggtcttgacggctgcggatgcccagatcgaccagcttgccaaggacctcggacagcggctgtgccaggaggaaggtaaggtcacctcctgccggatcctgggcgtactgggcgagcagacgtttgtgagtcgtgcgggcaagagctatggatttccaggtctggccgccacggtcgatctggcgggggacaaaaaggtttcaacaaacaagatcgaccccaatgcggtggtttctgacttggtgcgtgtcctgttcgaggcgacgggtgacgaccgcatccgcgtccctggggcaaaaaattcttccctgtgcagggcctccgcttccatgtgtgcaggcaaggacaacactgacaagctcaagcaagtggacaatatcggcgaccgcgccgaggctggcacgtttgcagccgttggcattgcgattcgaggtggctggctgttctcgatcaacaatgaggcgctagccacttccatacaaacagcagttgccgtcggcgtacgcaaaaccgccgaaggcgtgatgtggtcgcggctccagaattgtcccgccaatttggccgcattggcatccgtcgacgcgtcaccacgcacggtcacattgcgcctgacggagtgatgccgcacgcggcaagcaggaagggaggactccttgcctccccgcagttgcgggtcgagtctaacccgcagccgaaaaccaagctaacgatggatagccgcctgcgtaagcctgagagccgtcactgcccatcacgcaaatgaatgatttcaacgctcgacgggcattcggacgatgtcaggcctgcaaatcgaatgatgcaggtagctgcgtcggggtctccctcaacgtatttgtccagagcatgaccgattttattgggaaatctgacagggatgaggcggagccgcgcgaaatgctcctccatccgagctcggacgaaatgttcggatgtacctagacttgtgtcaccccaaaaagtgtcatgaaagacaaagagctttgagagtgccaggtcccaaggatttactgtgaaagccagatcaacggggtgatttccccacttgtcatagatggcttggccaacatgtccgctccccactgccggcgcaaaggctgcgatcttaatgctacgaatattggggttgtccagcggacggacacgattctccggatcgtttccgaaattgcgctcataaacagggtcggccactgctgagagggccacagccgtacctcgcgagtgcacaagaaagcggagatcgacaggcttcgaaagccgattcaagatgggccgcaaacccctctggccagcgtagttggagctcagaagcgcatccggccagaaggtaagtcgcgtttgctccgtcatgatctccgggttgcgcgttcgaagtccgtcccagtagacctcaagaataaccgccggcttttcacttccaagcagattacgggaaccgctgtacagccgttgcgcggattcgaagtcctcattgaagccatgcaccagcaccaggagcgtgtcgccagcggcaagcttcgaattgagcgctgcaacaacggcatcttccgcttcccgccgttgctctggaccgtacagtcgccgaccgtgatcgccatgttcaagaatgtcgctcagtgcaaagcgagaattcacgcccggcgcccgttgcggccagggaatgctggaagcgtctcggggataaacatccccaagctggtcgaaagccaccctcacgagattgctggaaggcgctggctcaccagccaacacatagtcgccgggaggccgcacgtgcatgcctccgcatgcagcgagcagcaggcaactgcaaatcgccgttatgagcctcttcatagaactctccttcctcttgatttttagggttttttacaccagcgcccacgcgataaaggaagccgaccaggcgaccgccagggcagaaggaagcctgcgcgatgctatcaaaaagaacgcaggatgtgctgggcacgcaatccgcagtcgcatcaatgaagtcagcaacaaaggaatggcgggctgctgtccatgcaggggacgcataggggtcatcggccttgtcgatggatggcggggcaagcctccgggcttacccggagacgcgccgactgctatttcgcggtgcggaatactccgccgctttccttgacgatgccgcgacgcctatgcaaaagtcggtgaaaacgaacgatcgtgcgggaatactcccgacacctcgtcaccggatcgcaacgccgccgtccacgccgacgcggccaagtgccccggcttgccgggcggccagcgtgccgcatcgcacaggagacaaccatgcagtacctgcaacacgcatctgcacacccgcaccgtgaccgccacggcgcgccctgggccaggccatcccgcccgcgcatcacagcgcgcgagccggcgctgccgcccgcctgagttccacccccgacttcctgaccgtggccgcgcctggcgccgccgcgacggaacacgcacggcctttgccgctgcgtgcctggtttcccgaaccgcacgaggtacccctgtggcattgttccttcaacagttcctgaacggcctgacgctgggaggcgtctacagcctggtggcgcttggcctgacgctggtctacggcatcctgcacgtgcccaacttcgcgcatggcgccttctacatggctggcgcctatgtgtcgtacttcctgatgacatcgctgggcgtgaactactggctggcgatgcttggcgcggcgctggtggtggccgtattgtcgatggctgccgaccggctggtgttccacccgctgcgcaactcgcccgagctgcacgacatgatcgcagcgatcggcatcctgctgttcctggaagccggggcgcaggcgctgtggggcgcggacttccaccgcatgcccacgccctatggccagatcgtcgacgtgttcgggctgaccgcgccgctgcagcgcctgctgatcatcggcgccgcctttgcgctgatggtgctgctgcacctgttcctgacgcgcaccatgaccggcgccaccatcatggccatggcgcagaaccgcgaaggcgccgcactggtcggcatcgacgccacccgcgtgacgctgctggtgtttgccatctccggcgcgcttgccgcaatcgccgccacgctctacgccccgatcaacctggtctaccccagcatgggcaacctggtgatcaccaaggccttcgtcatcatcatcctgggcggcatgggcagcatccccggggccatcgtcggcgggctgatcatcggcatggccgagagcttcggcggcttctacgtttccaccgactacaaggacatcatcgccttcgtgctgctggtggtgatcctgtcgatccggccgcagggcctgtttgccggcaagacggcctgaggagcacaacacaatgaaagcactgcaaggaaaaaccggctggacgctgctgcttgcggcggccatcgccttcccgctgatcacgcccaacagctactacctgaccgtgatgacgctggccttcatctatgccatcgccacgctcgggctgaacctgatcaccggctacaccgggcaactgaacctggcccatggcggcttcatggccatcggcgcctatacgctgggcatcctgacggtggaccaccaggtgccgttctggctggccttcgtgctggccggcgtgatctgcatggtgctgggctatgtgatcggcgttgtgtcgctgcgcctgaagggccattacttctcgatcttcaccatgtgcgtgggctacatcatctacctgctgatcgagaagtgggaaagcctgacgcatggcacggtgggcctgatcggaatcccggtgccggccgcgatcgggccgctcagcttcgacagcgtgcaggcgcagtactacctggtgctgttcttcctggcggtcggcaccttcctgatgcaccgcatcgtcacctcgctgctgggccgcagtttcatggcggttcgcaacagcgacgccctggccgaggccctgggcatcaacctgatgcgcaccaaggtgctgtcgttcgtgctgtcggtgggctacgccggctttgccggtgcgctgtacgccgggcaggtgcgcttcctggggccggatatcgcgcgcaccgacctgaccttcgacatggtgatgtcgatgctggtaggcggcatcggcaccatcttcgggccgctgctgggcgcggtgctggtgccgtggatcacgcagtcgctgcagttcatgcaggactaccgcatgctggtgttcggcccggtgctgatcctgctgatcatcttcgtgccggacggcatcgtgggttcctggctgaagaagcacgcacgcaaggccgcggccgaacggcgcggcaagctggcggcgcagttccctgcacaacccgtcaccgctgtcccgaccacccgcgccggagccgaccatgcttgagatccgcaacctgaccaagaaattcggcggcctgaccgcggtgcacgatgtctcggtgaccttcgagccaggccatatcaacgccatcatcggccccaacggcgctggcaagaccaccttcttcaacctggtggcgggcacgcatgcgcccagctccggccagatcctgttcaagggcgaggacgtggccggcctgcgcgccgaccagatcgcgcgcctgggcgtggcccgcaccttccaggccacggcgctgttcgaccgcgccacggtgctcgacaacctgatcgtcggccaccgcctgcgcacccactcgggcctgcgcgacgtgctgttcagcacgcgccgcctgcgcgaggaagagcgcttgtgccgcgacaaggccgaagcggcgctggacttcgtcgggctgtcgcacctggcgcatgaggtcgccgccgatatcacgcaagaggcgcgcaaacgggtggcctttgcgctggcgctggcgaccgacccggaactgctgctgctcgacgaacccgctggcggcgtgaacccggaagagaccgtgggcctggccgagctgatccgcaagatggtgcgccatggcaagacggtctgcctgatcgaacacaagatggacatgatcatgcgcctggcagacaagatcatggtgctgaactacggcgagaagattgccgaaggcacgcccgcgcagatccagcaggatccgcatgtcatcgaggcctacctgggagccgaccatgttgcagcttgaacgcgtctcgctgtcgtacggcagcttccgcgccctcgacaacatcaccctgcacgccggcgccggcgagctggtggtgctgctgggcgccaacggcgccggcaagagctcgatcttcctggcgatgagcgcgatccaccgcatcagcggtggcagcatgcgcttcgatgggcgcgagctgtcgggcatgaagccgtcgcagatcgtgcaggccgggctggtgcactgcccggagggccgcaagctgttcccggcgatgagcgtggagaagaacctggtgctgggcgcctacgtgcaccggcgcgatggtgcgggtatccgcaagacgctggaagaggtctatgaactgttcccgatcctgcggcagaagaaggacgacccggccggctcgctgtccggcgggcagcagcagatggtggcgctgggccgcgccctgatgagccgcccgcgcgcgctgttgctggacgagccgtcgctggggctggcgccgctggtggtcaagcagatgttcgagatcatccagcgcatcaaccgtgccggcaccaccgtgctgctggccgagcagaacgcctacgcggcgctgggcatcgcgcatcgcgcctatgtgatcgagagcgggcgcatcgtgatggagggggatcgggatacgttgctgaaggatgaggggattcggaaggcgtatatcggggggtaggttcagaggagccggcctcgcgacagcaaaacacaaccagacctagcaagtgcagtactttcaggagacatagcaatgcaaagcaagatcatgcgccgtatcttcccgctggccgccagcgccgtggccgccatgctggcctctggcgccgcattggcgcaggaagtggtcaagatcggctataccggcccgctgtccggcggcgccgcgctgtatggcaagaacgtgctgtcgggcgtgcagatggcggtggacgagatcaatgcatccggcctggaagtcaagggcaagaaggtcaagctggaggtggtggcgctggacgacaagtactcgcccgccgaggccgccatcaacggccgccgcctggtgcagcagcacaagaccccggcggtgttcgtcccgcattcgggcggcatcttcgcgctgcaggccttcaatgagcaggagaaattcctggtgatggcctactccagcgtgccgcgcatcaccgacgccggcaacaagctgaccatccgcatcccgcccgcgtacacgggctatatcgagcccttcgtcaaggcacagatgaagcgctacggcaagaacgtggcgctggccccggccgaccacgactacgccaaggcctgggtgcaggccttcgtgccggcgtgggaatcggccggcggcaaggtggtggccaacaacccgatgtcgtacaccaaggccacggacttctacagcggcgtgtcgcgcgcgatgagcgagaagccggacgtgatgttcgtcggcggcccgtcggaaccgaccgcactggtggtcaagcaggcgcgcgaactgggcttcaagggcggctttatcgtgatggaccaggccaagatggacgagatggccaaggtcaccaacggcctgggcatgctcgagggttccatcggcgtgctgccgctggtcaacgacagccgccccgccgcgcagaacttcaacgccaagtacaagaagctgcatgacgggcgcgatgccaccaccgagatgtcgctgaactacaccatggtgtacgcgctggccggtgcgatgaagctggccggcaccaccagcgacgcggcagcgatccgggcgaagatgcccgacgcggtcaagggcctggccaaggaggtcaaccccaacgaagtcgacggcatcgacgccaagggcggttcgatggccgacaccatcgtcggctgggtgcagaacggcaagatttcgcaggtccggctgtcggagctggcgaagtaagccaggccgcgacggcgcccgcgcggcaccgcgcaagaacaaaccccggcaggccgcgaggcctgccggggtttctgccttccgggctccgtcaagcgggccgtgccactgccggcgatcgccgtcgcgcccgttgcgcgcctccatctcgccgcgttagttctgggcgcgctgttgctgttgctgctgttgctgttgctgctgctggcgctgctgctccatctgctgccgctggcgctcctgcatctgccgttgctggtcctgctggtgccgctgctgctcctgcattgcacgttgctgctcctgcgcggcacgctgctgctcctgcatgtggcgctgctgctgttccgcctgctggcgctgcatggcctgctgtcgttgctgctcctgcacctggcgttgctgctcctgcatctgccgctgctgctcctgcatctggcgttgctgtgccatctgctggcgctgggccgcctcggcctggcgctgctgcgcctcctgcatttgccgctgctgctcgaaacgctggcgctgcatctcctggccctgccgctgctgctcggccatctggcgctggcgctccgcctgctggcgctgctggtcggcggcctggcgttgctgggcttcggactggcgctgctgctccatctgctggcgctggatgtcttgcgcctggcgttgccgcgattcctgcatctgccgctgctgctgggcttcggactggcgctgctgctccatctgctggcgctggatgtcttgcgcctggcgttgccgcgattcctgcatctgccgctgctgctgggcttcggactggcgctgttgctccatctgctggcgctgggcgtcttgcgcctggcgctgccgcgattcctgcatctgccgttgctgctgggcctcctgcatctggcgctgttgctgggcatcctgcatctgccgttgctgctcaaagcgctgccgatgcatttcctgcgattgccgccccggatcgggacggtcctgcccatccgcccactggcgctgctgcatgcgctgctgatcctgctggcgttgctggtcgcgggcctggtcctgccactggcgttgctgggcgtcgcgttgccgggcctcctgctgttgccgctgcagatcaggcgcctgccgctgctgctcgcgcagcgcgcgctgctgttcccgctgcagctccatctgctggcgctgcaaaacctgctgctgttcgcgctgcatgccctgcgcccgccgttgcgggtcggccggtccgcccggctggcccggctggccaacaaagccgcgggcttcgtcgggccggctgctctggccgcggccgttgccgcgccagggttcgcccggggcgttcgaatagttgcgatcgccacgtgcggggccatcggcatcgccgcggccggcgcgcggctgcgacggcgcctggtcgcgcgcggcgatggccgcctggctcatgcgcacatcgggcgcccgctgcacgtcgcgcccgggccgccgctcattgccgccgcgccaggccgggccggcgccgggcacaaccccgccctcgcgcgcgaagcggcgggccaggtcgtccgtggcgggccggcccggcgggcgggcggcgatggcctggcgctcgaagccatggcgggcctgcggcggcagcggccgcatcggggccgatcccaccaggctgcccttgaccggcgccactggcggcgcccccctggcctcgcctgccggcaggttgcgccattcgtcgcgatgcatgccgcgcaccgggcggccttcgacgaaattgcgtgccggcatgccggtgatggcgccgggcacgttgcggttggcgtaaggcggaggccggcggtcgcccatcacgaagttgttcacggtgacgcgattgatgcgggcgacataggtcgggctggcgcgatagaccggccggtacgcgtcatgcggccccagcggataccaggccacgcccggcccgctgccaacgcgcacgctccagttcgggccgctaacgccgacaaaggccaccaccgcgggggcgtagcacgggcgcacgcgcgggcccggcacccagccccagcgcgagcccacataggcccagcggccgtagtgcgaaggcgcgaagccccagggcgcgtcgtcgatccaggtccagccccacggcgcgatccaggcccagtgcccggcgctgtacggcgcccagccggcgctgaccacgtgcgggaaccagaccgcgccgtagccggggtcttcctgccagtcgccgtagccgtccagcgcggcgtagcccggcatctcgcgcggcacgtagcgggcggacggcgaggcgtcttcgcgcgcgtcgcgggccgcggtccagcggtcgaaggcgtcttccggcgcgccgccgccaccggcgtcggtcaggtcggtgccggcaaagcgcatgcggtcgccgcgctgcagctcgatcgagcggctgtcgccgtagaccacggcgctgccgtggcgcatggtcacggtggtggtgctgccgtcaggcgccacatccagccggtagtcgcccggctcgcgcggcacgaaggccaggttgggggtgtcgacctcgaccgtctggcccggcggcagcgcgcgcacgcgcagctgcagcgtgccctgggtcagcttgacctgcgtggcgctgtcgtccaggttcaggatgctggccgcggtggcaccgcccagccggaccgccaccgtgccggcatgcacctcggcacggccgccgtggtcaagccaaagccggtcgccggtggtgaagggccggttcaggcctgcggcagcccagtcgtccgagcctgccggcgcaaagctgagattgccgtcgacggcggtcagcgtggcaatgcgcgaggaaggatcggcttgctggtactggccgtcagtcgtcggcgcatcaagataggcctcgccgggagggccggcgggcacctgggccagtgcagccgccgccaccgccaggccggcggcggccatggccgtcagcgccagcctgccacggaactggcctcgagcaggggggacagattgggaaggatcgaacatggaagtcaggaccaggacaaaacgcataacgcaccggggcggccggccgatgtcagcggcaaccctaatgtcaccatacattgccccggatgccgcggcacgcccggggcggcagactttgtaagttcgtatttcgccatgcggccatgccgcgcgggcaggaccgctatcccaggcaggctgcgggcgggcggggggtcagcgggtgcccgggacgagcaggctcgccgtcaaaggtggaaacaacttccctgacagggcggggggcaaaacggcggcggaagcggctcagcggccggactgctggcgcagcatttcggtcaggcgctcggccggcatcgggcggccgtacaggtagccctgcgcctcatggcagccgttggccagcaggaagtcgcgctgctcgggcgtttccacgccttctgcgaccacgccaatgtgcaggcttgcgcccacgttgatcaccgagcgcacgattgcggcatcgaccgggtcttcggtcacgttgcggataaaggactggtcgatcttgagccggtccaccgggaacgacttcaggaagctgagcgaggcatagccggtgccgaagtcatcgcaagtcagcgtcacgccgtcgcggcgcagcgcctgcagctggtccgcgacctcgtcgccctgctgcagcgcgatggtttcggtgatctcgatctccaggcagtccggggccagttccagcgcgcgcagcacgtggcgcacctcggtcagcagccggctttcggacagctgggccgcgaacaggttgatcgccacccgcggcggctggggaaaggccagcgaccacgcgcgcgcctgggcgcaggcggtctgcagcagccacatgccgacatcgctggcgatgctgctgccggccagcgcgtcgatgaaggcggccggcgccagcaggccgcgggtcggatggcgccagcgcatcagcgcctcggcaccgtgcacgcggccgtcgcgcaggtcgacctgcggctggtacagcagctcgaactggcgctgggcataggcttcgtgcaacgcctgcaccagcgacagccgcgtggtcacgtccgagcgcatctgcggcttgaagaagcggatggtgcggccgccgtcgtgcttggcgcgggccagcgccaggctggccgcggccagcacgtctgacccctgttcgccggcggcggggatcacgcaggcgccgatgctggccagcacatggtggcggccacccgcgttctcatgcggggaggacagcatcgagaggatcgccgcgccgacatggcgcaccagcgtgggatccgcaatggagggaagcagcacaccgaactcgtcgctgccaatgcggccgatggcagcgtcgcgcggcgaggcgtcgcgcaggcggcgggccacgcgctgcaggatcaggtcgccttcggcatgcccgtgcatgtcgttgaaggcgcggaaatcgtcaatgccgatcaacagcaaagcacagcggggcaccgcctcgctctgcaggcgtgcctccagccgcttcagaaatccctggcgattgtcaacgccggtcagcggatcgagatccgagcctggcgaggcgccagtcgccttcgcccccgacttggccaccatccctgccccatctgtaattgtcgacattgttacccgctagcaatttagcaagtgtgacgaaaacttggaaaaaatcaagcagttccgattgtggcgggaatggctatgcacccgcgcaacggcgccgcattgcgcgttgaatcgggtcccggcttacagtaccctaccgcgcgtcgaggccgcccgccgccgccgcgccgccccttgctaccccgagaggagcccctgaggcggctttgcggggaatggccgctcctgaacaagaacatcaccgggaccacaccgtgaacgaatggaccatccgcacgcgcatcctggcaagcttttcgctgatcctgcttgtcatggcgctgatgggcgttgtctcctacacccgcctgagcgccattgagcgcgaaaccacgctgatgctgaaggacgcgctgcccggactgaaccacagtaccggcatccgcggcatctggggcgagcgctacgtgctggcgtggcagaccatcaatgccgccgacgaggccgagcggcgcagcttccagcaacagggccaggacgccgcaagccggctcgacaaggtcgagcagcagtacgagacctcgatcacgcgcgacgaagaccgcgccgccttcagggcctatcgggacgtgcgcgcgcaatacgaacaggcagcccagatcctgacccggacgggcgagtggaacggcgccgccgcctcagccgcgttgcgcggcaccgtgcatgaccgctggatcgaggcgcgcaaggccgcccagcacctggtggacgacaacagcgcggtcaatgcgcgggcggcgcgcggcatcgacgacgccgtcaatgccgccaagatcggcatcgaagcggcactgatcgtggccctggtggtcgccatcgtctgcggctacctgctgctgcgcgcgatcacagtgccgatgcagtcgatcgtcaacctgctgtccggcatccgcggcggcgacctgcgcctgcgcatggcgctgcgccgcaaggacgaattccaggaagtggaggcaggtttcaaccagatgacgggagagctgacctcgctggtgggccaggcgcagcgcaccgcgatccaggtcaccacctcggtcaacgagatcgccgcgacggcgcgccagcagcaggccaccgccaccgagaccgccgccaccacgacccagatcggcgcgacctcgcgcgagatctcggccaccgcgcgcgacctggtgcgcaccatccatgaagtctccagcgccgccgagcaggcggccgggctggccggcaccggccaggtcgggctgtcgcgcatggaaggcaccatgcagcatgtgatggacgccgccggctcggtcaatgccaagctggccacgctcaacgaaaaggccagcaatatcaaccaggtcgtgaccaccatcgccaaggtggccgaccagaccaacctgctgtcgctgaacgccgcgatcgaggccgagaaggccggcgaatacggccgcggctttgccgtggtggcgaccgagatccgccgcctggccgaccagaccgcggtggccacctacgatatcgagcagatggtgcgcgagatccagtcggcggtgtcggcgggcgtgatgggcatggacaagttctcggaggaagtgcgccgcggcatgtccgaggtcacgcaggtcggcgaccagctgtcgcagatcatcgcgcaggtgcagtcgctggcgccgcgcgtgctgatggtcaatgaaggcatgcaggcccaggccggcggcgccgagcagatcaaccaggcgctgatgcagctgtccgaggccgcgcagcagaccgtggagtcgctgcgccagtcgagccaggcgatcgacgaactgacgctggtggccaacgacctgcgcagcggcgtctcgcgcttcaaggtctagggcctgcgccccgccgccatgaaacttttcctgctgttccgcctcggcgctgaccactatgcgctcgatgccgccgaggtggccgaggtgctgccgctcacgcggctcaagcagatccccggcgcgccggcctgggtggcgggcctgatggagcgccgcggccagccggtgccggtgatcgacctgccggcgctggccaccggcgtgccggcggcgctgcgcaccagcacgcgcacggtgctggtccactaccgccgccatggcggcgaggccggccggctgctgggcctgcgcctggaatcggccacccagacgctgcgctgcccggtgaaatcgtttgtcgacggcggcatcgccggagccagcccgcgctaccttgggccggtgcggcacgacgcgcgcggcctgctgcagtgggtgcgggtcgatgccctgctgccggacgacgtccatgccatgctgtttgccgacacctccggggaggccgcggcatgagcactgccacgcacatcgaggccctgctcaaggcccgcatcggcctggacgccggcgccatcggcaccggcgcggtagcacgcgccgtgcgtgagcgccagcaggcacggcaggcgccggacacccaggcctactgggacttgctgcacggcaccgccgatgaattccaggccctgatcgaggccgtggtggtgcccgagacctggttcttccggcatcgcgaagcactgctggcgctgggccgccttgccgccgagcgcgcctttgccgacggcaggcgcaccctgcgcgcgctgagcctgccctgctccaccggcgaagagccctactcgatcgccatggccatgctcgatgcgggcgtgccggcgggccgctttgccatcgatgcggtggacatcagcgcccgcgcgctggcccgcgcacgccagggcgaatacggcgcaaacgcgtttcgcagcgcgccgctggatttccgcgaccgctatttcacggccacgcccagcggctatgtgctggatgcacgcgtgcgcgcacaggtgcggctgctgcagggcaacctggtcgatcccggcctgctggccggcgagcggccctatgacttcgtgttctgccgcaacctgctgatctacttcgacgcgccggggcagcggcatgcggtgcagacgctggcgcggctggccgctgccgacggcattctctttgtcgggccggccgaggccagcgtgctgagcgcgcagggcctggagccggtcggcctgccgctgacctttgccttccgcaagccgtccgccgtgcccgccgccagggcggcgccgcgtgcgcccgtgcacgcggcccagccgccgcgcatggccgcaccgccacggctgccgcggccgcctgcctcgatgcggcccgtcccggtcacgcccccgcccctgcggcccgcagcgcccgcgcctggcaacgatcagcgcgccgcgctggctgccattgccgcccaggccgaccgcggcgagctggaggctgccaccgcagcctgcctggcgctgctcgagcgcaccgcggatgccaacgccgacgcctattgcatgctgggtgtgctgcacgacgccgcgggccgcgccgcgcaggcccatgccgcctaccgcaaggcgctgtacctggacccggcgcaccaggaaagcctgtaccacctggccgcgctgctcgataccgaaggcgatcacgctggcgccatgcacctgcgccagcgcgcgcaacgccacacccgcaagcaccatggctgagcccccaggcattctcctgcgcaccgaaaacgtcgacgactgctggcggcgcatcggcgtgcgcggcgacggctcgtgccccgccctggccgagcacgcgcactgccgcaactgccccacctacgcccgggccgcggccatgctgctggacgcgcaacggctggacgtaatgccggaggcactgcccgatgccgccacgttcaccgacgatgacggggccttgccggcagaacgcggcaccgcgctggcctgcctggtgttccgcatcggcgatgagtggctggccttgccaaccgcagcgctgagcgaagtcaccgccccctgcccgatccattcgctgccgcaccggcgcgatgccgccgtgctggggctggccgcggtgcgcggcaacctgctggcctgcctgtcgctggcccggctgttcgacgcgggcgccggtgaaagtgccagcggcagccgtttcctgatcctcgggcagggccgcgccgcgatcgcgctgccggtggccgaggtgtctggcatcgcccgcgtgccgcagcccgcgctgcagccgctgcccgccacccttgcgcgggcctcggcgcgctacacgcaggcgctgttcctcgaccagggccgcagcgtcgggctgctcgatgccgcactggtacgccaggcgctggccaggagcctggcatgaattccgagcaactgcgcgacgcctcgctgctggaactgttcgcgctcgaggccgatgcccaggccgaagtcctcaatgccggcctgctggcgctggagcgcaacccggcagccgccgagcagctcgaagcctgcatgcgtgccgcccactcgctcaagggcgcggcccgcatcgtcgggctcgatggcggcgtgcgcgtagcacacgccatggaagactgcctggtcgccgcacagggcggcatgccgctgaccgccgcgcatatcgacgcgctgctgcaaggcaccgacctgctgctgcgcatcggccatccgcccggcggcaatccgggctgggccgagcacgcgggccgcgccgagatcgatgcagtggtgcagcggctgggcacggtcgatggcggtgccgcggcgccggtcgtgcaggcacagccagcgccggccccgttaccggaaccagcgcccgcgataccggcgccgccggcaccggcagacgacacacaggagcgcatgctgcgcgtgaatgccgacgcgcttgaccagttgctggcgctgtccggcgaggccatggtcgagtcgcactggctgcgccccttcggcacctcgctgcagaaggcaaggcggcaacaggcacgcgcactgcgcgccgtcgatgcgctgcagcaagccttgcaggacggcaacgcgggcgcggctgcgcacaccgcgctggcagaactgcgccagctgctggacgaaagccacgatcagctggccgcgcggctggaagagttcgaacagtacgatcaccgcgccacgcggctggcgcgccggctctatgacagcgcgctggcctcgcgcatgcgcccgctggcggacgcgctgaccggctatgcgcgcatggtgcgcgacctcgggcgcgcgctcggcaagccggtgcacctggacctgatcggcgccggcacccaggtggaccgcgatatcctggaagcactggacgcgccgctggcgcacctgctgcgcaacgcggtggaccacggcatcgaagcgcccgaggtgcgcgcggcgcagggcaagccggcggaaggccgcgtcacgctgcaggcgcgccacaacgcgggccgcctggtgatcgaaatcttcgacgacggcgccggcgtcgacctggaagccctgcgcgacgccatcgtgcggcggcggctggcgtccgcagagaccgcggcacggctgtcgcaggcagagctgctcgacttcctgctgctgccgggcttcagcatgcgcgactcggtctccgaggtctccggccgcggcgtgggcctcgatgccgtgcaggagatggtgcgccgcgtgcgtggcagcctgcgcctgacgcagcagccgggccagggcctgcacttccggatggagttgccactgacgctgtcggtggtgcgcgctctgctggtggaggtcgcgggcgaagcctatgccttcccgctgggccgcgtgctgcgcgcggcctcggtggcgcgcagcgagatcgagcagaccgaagggcaccagcatttccgccacgaaggccgcgccatcgggctggtcagcgcggcgcaggtgctgcaacgccccgaggctgacgctgccaatgcgcacgcgcaagtgccagtggtggtcatcggcgaggccgagcgcatctatggcattgccgtcgaccgcatgctgggcgagcgcctgctggtggtgcagccgctgccggcggcactgggcaaggtccgcgacatcgccgccggcagcctcaccgacgacggcacgccggtgctgatcttcgatgtcgaggacgtgatccgctcggtcgagaagctggtctccgagggccgcatcgaaggcgtgcggcaggcggccgtggccagcgtccaggcgcgcgcgcggcgcgtgctggtggtggacgactcgctcaccgtgcgcgagctgcagcgcaagctgctggccgggcgcggctatgacgtggcggtggcggtcgacggcatggacggctggaatgtgctgcgcgccgagcccttcgacctggtcatcaccgatatcgacatgccgcgcatggacggcatcgagctggtgcgccggatccggcaggacgccgcgctgcggcagctgccggtgatggtggtgtcgtacaaggaccgcgaacaggaccgccagcgcgggctcgaggccggcgcggactattatctggccaagggcagtttccacgacgccgcgttgctcgacgcggtccatgacctgatcggcgaggcacgcccatgaagatcggcatcgtcaatgactcggcgcttgcggtagccgcgctgcgccgcgcgcttgcgctggatccgtcgttcgagatcgcctgggtcgccggcgacggcgaacaggcggtgcagatggccgcgcgccagaccccggacctgatcctgatggacctgctgatgccggtcatggacggcgtcgaggcgacccggcgcatcatgtccgccaccccctgcgccatcgtggtggtgaccatggacctgggccgcaatgcctcgcaggtgttcgacgcaatgggccacggcgccatcgacgcggtcgacacccccacgctggtcgagcccgacgcccagcttgccgccgggccgctgctgcgcaagctgcgcaatatcggccgcctgctggccggccgcgtggccccgcagcataggctgacggcagcgccgcgcgcagtggccgcaccacggctggtggcgatcggcgcctcggccggcggcccggccgcgctggccacgctgctgggcgcgctgccggcggacttcggcgccgcggtggtcaccgtgcagcatgtggacgaagcctttgccgccggcatggccgactggctcgacggacagtgcaagctgccggtgcgcattgcccgcgccggcgacgcgccccaggccggcacggtgctgctggccggcaccaacgaccacctgcgcctggccagtcccacgcgcatggcctactccgaacagccctgcgactacctgtaccgcccctccatcgatgtgttctttgaaagcgtggtggagcactggcgcggcgacgtgatcggcgtgctgctcaccggcatgggccgcgacggcgcgctggggctgaaggcgatgcgcgagcgcggcttcctgaccatcgcccaggaccgcgccaccagcgccgtgtacggcatgcccaaggccgccgcagccatgggcgcggccgcggagatcctgccgctgccgcgcattgcgccgcggctggtgcaggcatgcggcggcaccgtgccgctttgacccgatgcaatacgtcgcggccggcaccgggaccgtgacacccaggaactgaacatgcaacccgaattacccaaccgacccgcagcgcctgcggccgacaaggactaccttgccatggtgctgctggtggacgaccaggccatggtcggcgaagcggtgcgccgcgcgctctccaccgaagccgacatcgacttccactactgcgcgcagcccgacgaggccgtggcggtggcgcagcggaccaagcccaccgtgatcctgcaggacctggtgatgccgggcgtggacggcctgacgctggtgcagcgctatcgcgagaaccccgccacgcgcgacatccccatcatcgtgctttcgaccaaggaagatgccgcgaccaagggcgcggcgtttgccgccggcgccaacgactacctggtcaagctgcccgacagcatcgagctgattgcgcgcatccgctaccactcgcgctcctacctgaaccagctgcagcgcgacgaagcctatcgcgcgctgcggcaaagccagcaacaactgctggaaaccaacctggagctgcagcggctgaccaattcagacggcctgaccggcttgtccaaccggcgctatttcgatgaatacctcggcgcggaatggcgccgcgcgctgcgcgagcaaacccaggtggcgctgctgatgatcgacgtcgacgcgttcaaggcctacaacgacacctacggccacgtcgccggagacgaggtgctgcgccgcgtggccgctgtgatccgcgacaattgcgtgcgccccaccgacctgcccgcgcgttttggcggagaggaattcgccatggtgctgccggcgacctcgccaggcggcgtgcggctgctggccgaaaaggtgcggcgcgcagtgcaggggctggccattgcccacggcggctcccccaccgccgactgcgtcaccgtcagcatcggcggcgccgtgctggtgccccagcctgaccaggcgccgaaccaggtagtggaagccgctgatgcaggcctctaccaggccaagcgcaatggccgcaaccaggtgatgatggcgcaaggctgagtcactgcagcagcacagccgcaacaaccagttacacactggcggccaccggccaaccgggccaccagcccggccaacgtcccgccaggccccgcacctgcgggcctggccggccccgccacgcacgcacgcgtcaccgcttgtcggaattgtccgacatgcgattcggagccccgcgcctgtctcgcccctgggttgatacctatcgttgcatcacgacaggtgcaatcgctgcgcctgcaacaacagacagccaactggccacgcgaccggcgcgcccccgcgcgggcatgggccagatcgtctctgactcctccaacagcaagaggtgacccatgttccgatccaagaccctgtttatcggcctcgcgttagctgccactgcagtcctgactgcctgcggcggcggtgatgacggcatcgacgaccgcatcgggctgagcaagccgacgatccgcgtgatccacgccatcaccggcggcccgaacgtcgacgtgctgcagaacggcaccctgaccagcttcgtgaacaagccttacaagttcgtctcgacctacttcaatgtcgaaaccggcaaccagctgatctccttcaacacggctggcacgcagacggaactgggccgcgccaccctgaccgccgccaccggccacaaatacaccgtggtcgcgctgccgggtgcgagctccgctgaaacgctgacgatcgacgatccgttcgagaagggcctgctgtcgcacaaggcacgcgtgcgcagcctgaacgcctcgttcaatgcgcagaacattgacatctacctgaccttgccggccatcgacctgaactcggtgggcccgaccttcgccaacgtgggctacaagcaggctgtgccagcctcgggcaccgactcgatcgacgtggatggcaacaccacctaccgcctgcgcatcaccaccgcggggaccaagaccgtgatcttcgattccggcgcactgaccctggccaacaacgctgactggctgatcaccacgatcccggtggatggcattgccggcctgacgccgaacaagatcaaggtgctggtggcacgcggcgatgatgagtcgcaagctggtcttgaactcgtaacgcagtaacagcgtgcttgcagctgcctgcggcaggcgggcagcatgcagaaggccggtccgatgggccggccttttttgtctgacgggtggcagctgactgcccctactcttctgcccccggctccagctccgccttcagcaccgccaggtgcgacatataagcctccagctccgcccgcccctgctcggtgatgcaatagacgcggccacagccttcaaccagctcggcagtaatggcccgcgccatcatcaggctgcgcaggatcggccgcaacgagcggatattcttgtcgatgccgcgctcgcgcagccggtcgaccaggctcaggaccgtggacgggctcgactgcacaagcttgagcacatggatgcgtgagaaaagccggtcaaagatgggcggtttcatgggcgctgtcggcgcacccgatggtgcgggaatcctgatcatcatgcgcagcccatgactgctgccgcagtcgggcgctctctggtcttgatggcgggcggatacgcgatcggcccgcgaaagcaaacggggtgcgcgaaggcaccccgtttgcttgcgttgcgtgcgccggccggcatcaaacaggccggcgcccttccggggagcgcgcgtggcgctattcttcctggaacgcttcttcgcgcttggccttgatcgacggcagcgccactactgcaaccagggcagcggctgcgatcagcagtccgaccgacagcggccgggtcacgaacacggtgaagtcaccacgcgacagcagcagcgtgcggcggaagttctcttccatcatcggccccagcacgaagcccagcagcagcggagcgggttcgcagcgcagcttcaggaacaggtagccgatgatgccaaagccggcggccatgaacacgtcgaaggtctggttgttgactgagtacacgccaatgccgcagaacaccaggatcgccgggtacaggaagcggtacggcacggtcagcagcttcacccagatgccgatcatcggcaggttcaggatgatcagcatcaggttgccgatccacatcgaggcgatcaggccccagaacagcgccgggttgctggtcatcacctgcgggccgggctggatgttgtggatggtcatcgcacccaccatcagcgccatcaccgcgttgggcggaatgcccagcgtcagcagcgggatgaacgaggtttgtgccgcggcgttgttggcagactccggacctgccacgccttcgatcgcgcccttgccgaattcatgtgcgtacttggaggtcttcttctccagcgagtacgccgcgaacgaggccagcgccgcgccaccaccgggcaggatgccaagcgcggagcccagcgcggtgccgcgcagcacagccgggatcatgcgcctgaagtcttccctggtcgggaacaggttggtcacgcggttggtgaaggtctcgcgcgcttccttctgctccaggttggcgatgatctcggcaaagccgaacatgcccatggccagcgccacgaagtcgatgccatcggtcagttccggcacatcgaatgagaagcgcgccgcgcccgagttcacgtcggtgccgatcaggcccagcaacagccccagcacgatcatcgagatcgccttgggcagcgaccccgaggccagcaccacggcgccgatcaggcccagcaccatcagcgagaagtattcggcagggccgaacttgaacgccagttcagacagcggcgtggcaaaggctgccaggatcagggtggccacgcagccggcaaagaacgagcccaggccggcggtggccagcgccacccccgctcgtcctcgccttgccatctggtagccgtcgatggtggtcaccaccgatgacgattcgccaggcaggttgaccaggatggcggtggtcgaaccgccgtactgggcgccgtagtagatgccggccagcatgatcagcgcggccaccggcggcagcgtgtaggtgatcggcagcagcatggcgatggtggccagcggccccaggcccggcagcacgccgatcagggtacccagcacgcagcccaggaaggcgtaggccaggttctgcagcgacagggccgtggaaaagcccagcgcaaggtgatcaaacaattccatggtcggcgctccttaaccggtgataaaggccggccacaccggcatctgcaggttgatgccgtagacgaatgcgccaaggctgatcagcaccagcaccacggcgttgagcagcgcgcccttccagctgaattcatggctggccatcgacgacaccatcaccagcacgaacaccgacagcaccatgcccagcggcttgagcagcaggccgaacagcaccaccgaaccgaggatccacagcagcgtcttcaggtcccagcgcgccagatggtcttcctcgcccttgggcgacagcgaggacagcagcaccaccgcccccagcactgccagcaccagtcccagcaggaatggaaaatatccgggtcccatcttcgcggccgttcccatggaatagccgcgagcgacccaggaaaagcccagaccgaccagaacgaacatcaggccggaggcaaagtccttttggctgcgtatgcgcaaaacgattctcctcaaagttcacgaaatgccatgccggggacgcactggctcgagcggcaaggcatgcggcgcgcatgctccccgacggttgacccgaaccttagagacgtgatctttcaggtgcctttcatttgtcttggtttaggggtattcaccgataccccttggaaacaagggcaaatccagcctatttacgaaaaaaatacatcacaacgtgatgtatctcttggtgaagaatccggaagaaaagtcgacgggaatgtcaggcgaacaagacggcacgcgcacttgcatcaaggcaaggcgcggccggaaggatgcgcgcctgctctggccaggcaggcgacgcgtgcgctgggagggagtgccagcgatgacacgatgacacaccgatctttcgaatggctttcaaagccggcggcacgatcgcgggccgctgcagctcagcgcacgactgcgggctcgggcgttgcagaggcggtctcctcgacgacctcgcccgcgtcttcgcagggcgttcccatgctggtatcgggcgcctgccccacggcttgcgccgggtgcggcacggtgggcaggatatggctgcggcgccagttgccgaagcggtagtagccggccgccagcaccagcgacaccaccgagcccagcggaaagctccaccagatcgcctcggcgccgatgcgcggtcccagcaaccacgcgaacggcagccggatcacccacatcgacaggaacaggatcaccagcggcgccatcaccgcgccggtggcgcgcaccgtgccgaagatgacgatggtgaagccaaacaggatgaacgaccacagcaccaccacgttgatatgctgcgcgatgccgatggcgacgccgtcagtgcccaggaacagccccagcggatgccggttgaacagatagatcagcgcgaccagcgcaccggtcatcaccacattgatcagcagccccacgcgcgtgatgcgcgacacccgctgccacagtccggcgccgacgttctgcgccaccatcgatgacacgctcgcgcctaccgccagcgcgggcatctgcacataggtccacagctgcgaggccacgccgtaggcggcggtggtctgcgagccataggcattgaccagcgccatcatcacgatcgccgacgacgagatcaccaccatctgcaggcccatcggcaagcccttgaccaccagtgcccgcaggattgccggatcaggccgcagcagtgcaagctggccacggtgcagcagcaggaaatggtggcgccggtacagcagcaccatcatcgccgccaggctcgccagttgtgccatcagcgtggccagcgccgagcccgcgatacccagcggcgggaccgggcccataccgaagatcagcaccgggttgagcgccacgtccagcaccaccgacaacagcatgaaccagaacggcgtgcgcgaatcgcccgcgccgcgcagcgtcatcatcacgaagttgtagaagtacatgaatggcagcgccaggaagatgatgcgcaggtagctcaccgccagcggcgcggcgtcttccggcgtgtgcatcgccgcgaggatggccggcgtatagaaatagcccagcgccgaggccagcaccgacagcccgacaaagaaggtggtgctggtgccgaccacgcgacgcgcctcgtccaggtcgcgcgcgcccacggcctgtccgatcatgatggtgttggccatgctgataccgaacaccacgcccagcaggaagaacagaatgatgttggcgttggaggttgccgtcagcgcggcctcgcccaggaagcggccgacccagaccgaattgatcgaggcgttcagcgactgcaggatgttgctgccgagcaccggcagcgagaacagcagcagggtgcggccgatcgggccggtggtcagtctggcgtctggcttcatgaggcgtcgcgcatggggaaatccggccagtctattcctgcccggaggcagctacaaggacacacggccggcacggcgccgtgctttttacctgaatgagttattcccctccggttgcggccccctgcatactcggcacgggaccaccgcgtcctaggccggctgccggaagcaatgcccggcatgcgcgtgcgcccttcagtcgcagtcaaaacgaggaggtggggtcatgtttgtcggtttccagcctgtttccggcgccctggtgccgtttgcctatgactggccgatggtgggcctgtcgttcctgatctctgtctgcggcgcctacgtgggcctgcgctggtcgcggcgcgtgcgcatgcccgacggccgcctggacgtggaccggctgttgtgcgccagcgtggcgctgggcggcggcgcggtctggtcgatgcatttcatcggcatggtggcctaccagaccccgacgcaccgcgagttcggactgttcatgacgctggcttcgctggtggtcgtgatggtgctggccggcgccggactggcgatcgcctcgcgcccgcgcggcagccgtaccgacaacgtgatcaagggcggcgtgctgaccgggctgggcgtggtggcgatgcactacaccggcatggccgcgatccgctccaacacccgcttcgactgggacctggccatcatcgggctgtcggtggtgatcgccgtggtggtgtcggtggtggcgctgtggctggccaccacggtgaagacccgcggcaagcagctggcagctgcagtggtcatgggcgtcgccgtctgcggcatgcactacaccggcatgtctgcgggcaccatgatctgcaccagcccgacctacgcgcccagcctgttcgccatcgagggcgacagcatcggctatgcggtgttcggcctgacgctgatcacgctgctcgtgatcctggtggtggaagccacccgcaccggggctgaagtcgtgccggtggcgcgcacgcgcgatgccgcctgacatcggctgaaccggccgcggggacattcccgcacattcctcctgggaacacacccggcgcgctgcatgaacgcggccgccgggttaagcttgcggtttcaccgcccaccaggagaacacacatgtaccaggatctcgccctctatatcgacggagaattcatcaagggaggcgaccggcgcgagcaggatgtcatcaacccggccacgcaggaagtgctgggcaagctgccgcacgccagccgcgccgacctggaccgcgcgctggccgccgcgcagcgcgcctttgaaacctggaagaagacctcgccgctggagcgcgccaggatcctgcgccgcgtgggcgagctcacccgcgagcgcgccaaggagatcggccgcaatatcacgctggaccagggcaagccgctggccgaagccgtcggcgaagtgatggtctgcgccgagcacgccgactggcatgccgaggaatgccgccgcatctacggccgcgtgatcccgccgcgccagcccaatgtgcgccagatcgtggtgcgcgagccgatcggcgtgtgcgccgccttcacgccgtggaacttcccgttcaaccaggccatccgcaagatcgtgttggcgctgggcgcgggctgcacgctgatcctgaaggggccggaagactcgcccagcgcggtggtggcgctggcgcagctgttccatgatgcgggcctgcccccgggcgtgctcaacatcgtctggggcgtgcccagcgaggtctcgacctacctgatcgaatcgccgatcgtgcgcaagatttcattcaccggctcggtgccggtgggcaagcagctggcggcgctggccggcgcgcatatgaagcgcgtgaccatggagctgggcggccattcgccggtgctggtgttcgacgacgccgacatcgaccccgccgccgagatgctggcgcgcttcaagctgcgcaatgccggccaggtatgcgtgtcgccgacgcgcttctatgtccaggagaaagcctatgaccgcttcctggcgcgctttaccgaggtgatcggctcgatcaaggtcggcaacggcctggaggacggcacccagatggggccgctggcgcatgagcgccgcgtgctgtcaatggagcagttcctggacgatgccagccagcgtggcggcaaggtggtggcaggcggctcgcgcctgggggacaagggctatttcttcgcgcccaccgtggtcaccgacctgcccgacgactcgcgtctgatgaccgacgagccgttcggcccggtggcgcccgtgacgcgcttcaaggacacggccgaggtgctgcgccgcgccaacagcctgccctttggcctggcctcgtatgtgttcaccaactcgctgaagaccgcgaccgaagtatccaacggcctggaagccggcatggtcaacatcaaccacttcggcatggcgctggccgagaccccgttcgggggcatcaaggattcgggcatcggcagcgaaggcggccaggagaccttcgatggctacctggtaaccaagttcatcacccaggcctgagcgcccgggcgcggtgcaaggcggcttgccgccggctccctccccggggccggcggcgcctccccgtcagcggaagaagataccgcgcgtcaggaacgtatgattcgcttcttccgccatcagccagaccagcaccagcaggcacagcggcggtaccaggatggcgcagatcagcgccatgcgctcccatgccatgtgcatgaacactgccacgatcagccccgccttcagccccatgaacaccaggatcagcgtccagcgcaggtagccggtgacatggaaatagtcgaccaggtacgacagcgtcgacagaacgaacagcagcagccagatcttcaggtacagcccgataggatgctgctggccggagtgcgcggcatgcccggcatcgttgccggagccatgcgctggcgtcaccggggttgcgggagttgccggattcgatgccatggccgtcaccagagatagaacaacgcaaagataaacacccagaccaggtcgacgaagtgccagtacaggcccgcgatctccacgatctggtagttgccggtggcctcgtagcgtccgcgcagcacgcgcgtggccacgatcagcaggtacaccacgccgcacgacacatgcagcccgtggaagcccgtgatcatgaagaaggtcgagccgaactgcgccgcccccatcgggttggtccacgggcgcacgccctcgtccacgatcagcttggtccattcgaaggcctgcatgccgacgaacatgacgccgaacagcgcggtgacgaacatcagcagcgcgcactcgcggcgcgcgcgccggtaggcaaagttgaccgccatcgccatggtgccgctgctggtgatcagcacgaaggtcatgatggcgatcagcagcaacggaatgtcggcgccacccacgtgcagcgcgaacacctcgctggggttgggccacggcaccgtggtcgacatgcgcacggtcatgtagccggtcaggaagcagctgaagacgaaggtgtcggacagcaggaagatccacatcatggccttgccccacgacaccttgaaggcctgctggtccgacgaccagtcggccagcaggccgcgcacgccgcccaccgggggcgcgggcgccacgccgggtgggctcgatggtgaagacagttgcgttgacatgccggtcctccttgctgccgccgccgctaggccgtgccgcagatatagcgcaccagttcgggcgtaagccaccccagcgccgccagcagcaccacccataccgccagcaggaaatgccagtagcgcgcgcacagccgcatgcgcagcaccgcggcctcgccgctgccgcgcgacgacatggcaaagccccagccggccaggccgcccagcacgtgcaggccgtgcatcgcggtcagcaggtagaagaagctgccggccgggttgccggcaggcatcacctgcatcgcgcccagtgcctgccaggcccacagctgcgaggcgacgaagccggccgcgcccagaccgcccaggcgcagcgcctgcctggccacggccatctcgccccggcccgcggcgcgcgacgacaccgccatcgccacgctgccggcgcccagcagcgcggtggacagccacacctgccagggcagcccgatgcggtgccagtccgggctgtccatgcgcagcgcataggcggtcaggaacagcgcaaacagcgaggtcaccacgcccatgaacacccacaggccgatgctcgcgggggcgcgcccttgcggccggtggttggcggcattctcgtcggacgggctgccgccgaaatcgtcgcggctgaccttgtacagggcttcggcgttcatgcgacggctccgcggctggcatgcggttcaggctcggccccgccctcttccggcggcgcgttctgcgcgataaagtcctcgcgcgcgcccggcacgctgtaggcataggcccagcggtacaccaccggcaggtgcggcccccagttgccgtgcgcgggcggcgtctgcggcgtctgccattccagcgaggccgcgcgccacgggttggcgtcggccttgcggccatgccacaggctccacaccaggttgaagacaaagagcagctgcgccgtggcgacgatgaaggcggccaccgagatgtacatgttcatcacatgcgccgactccgggataaaggcgtagttctcgtaggcgtagtagcggcgcggcatgcccagcacgcccaggtagtgcatcgggaagaagatggcgtaggtgccgacgaaggtgacccagaaatggatccggcccatgctgtcgtccagcatccggccagtgaccttcgggtaccagtggtagaggccgccgaacaccaccaggatcggcgacacgcccatcaccatatggaagtgcgccaccacgaagtaggtgttggacagcgggatatccacgctgacattgcccaggaacagcccggtcaggccgccgatgacgaaggtgctgatgaaggcgatcgcgaacagcatcggcacggtgaaatggatatcgccgcgccatagcgtgatgacccagttgtagaccttgatcgcggtggggatggcgatgatcagcgtggtggtggcaaagaagaagccgaagtacgggttcatgccgctgacgaacatgtggtgggcccacaccaccaccgatagcaccccgatcgccaggattgcccacaccatggtgcggtagccgaagatgctcttgcgcgaatgcacgctgaccaggtccgagacgatgccgaaggccggcagcgcgacgatatacacctcggggtggccgaagaaccagaacaggtgctggaacagcagggggctgccgcccttgtactgcagctgctgccccatcgacaccatcgccggcatgaagaagctggtgccgagggtcttgtccagcagcatcatcaccgccgacacgaacagcgccgggaacgccagcagcgccaggatggtggccatgaagatgccccataccgacagcggcatgcgcagcagcgtcattccttccgtgcgcgcctgcagcacggtggtgacgtagttgaggccgcccatggtggccgcgacgataaagatcgccagcgacaccagcatcaggatgatgccccagtcatggcctggggtgccgggcaggatggcctgcggcgggtatagcgtccagcccgcgccggtgggccctccgggcacgaagaagctggccagcagcacgatcaccgacagcaggtagacccagaagctgagcatgttgaggaaggggaacaccatgtcgcgcgcccccaccatcagcgggatcaggtagttgccgaagccgcccaggaacagcgccgtcagcaggtagatcaccatgatcatgccgtgcatggtgacgaactggtagtagcggttggcgtcgatgaactcgaagcgccccgggaagccaagctgcatgcgcatcaggttggacagcgccacgcccaccaggcccaccacgatcgccacgatggtgtactgcacggcgatcaccttgtggtcctggctccagacatagcgggtccagaagctctgcggcgcgtgatgggcggcatcgtcggcgtaagccatgcgggtctcctcacttcctggcgggcgcgggtgccgccgagggcggcacggccacggccgtcgaagtcgtataggtgccggacgcggccccgggcgtggcagcgggcgccccagagccagcggttgccgtggtggcggcgctggtcacggcagccgggccggcgggcacgtccgcgggcgccaccggcgccaccgtgccggcttccgccgcgccgctgccggccgacttgatataggcggtcagtgccgcgacctcatcctcgctcatcggcaacttcggcatcaccgggccgaagcccttgaccagccgcgcattggggtcggtgatctccttgtgcaggaaggcatcgtccaccttggcgctgctgccgtcgacaaaggtctcggtcttgccgtacaggcccttccaggtcggccccacgcccggattgccgtcgatgctgtggcagccgacgcagcccttgctctgcgccagcgcgcgtcccttctcgacggtgccggcgtcgcccgcggcgccgggtgcggcagcggccattgccgccggcggtgccgcggccttcgccagcgtcatggcaaaggtctgctgcctggccagccatgcctcgtacgcagccggttcttccaccaccaccgtgccgcgcatgttgtagtgccccacgccgcacagctgcgcgcacaggatatcgaagcgccccgcctgcgtcggcgtgaaccagaacgacgtcaccatgcccggcaccatgttcatgcgcgcgcggaacggcggcacgtagaagtcatgcagcacgtccttggagcgcaacagcactttgaccggcttgttcagcggcaggtgcacctccggtccgacgatcacgatattgtccaggccacgcggatcgtcggggtccagcccgagcggattcgcaccggtgacaaagcgcgcatcggaagcacccagctggccgctcttgccgggaaagcggaaggcccaggaccactgctgccccaccacttccatcaccatcgcttcgcgcggcgggcgcacgtagtcggcgtagacgaacaggcccggcgccagcagcagcaccacgcccagcgtggtgccgccgatcagccacagttcgagcttgctgttctccgggtggtaggacgcgcggtggccggtgccgccattgggatgcggtgcctcatgccggaagcgccagacgatgtagccgacaaacaggttgatgccgatgaagaaaatgccggtgatgaccagggtaatggtcagcgtgtcgtccatctgctgccagttggacgccagcggggtcgcccaccacgggctcatgaaatggaagagcaccgaaccgacgaccatgactacgagtgcgatggccaacgccatatccaccctcctcctcgcgcgcggcgagggatgcgcaagtcacgcaggtagacataagactagtgcatgccgtcaggtcactgcaaggcgacatgccaatgcattggtgtcgcactgcacaagcgcgcagcgcgagaaaaagcggcggcgggaacccctggttccggccgccgcaggtcttgcgcgcgtacccgcccaaaggctggcgcgcgcaacgcaaccgccatgagccggcgctcgccgcgccctgccccgaagcgctgtcagtgcgatacgtccttgctctccagcttccagtagcatgccgccgcggccatcccgaagatcagatgcccgatgaaggtatgccacccgcgcacctcgacaaaccagtggaaggccaacgtcatcacatagaaattgaagaagtacactaccatgccaaacacggcgcccgccagcattgccatgcccaggctcgaatccagcgtgaatggcgcgatgatggccgccaggatcatgcccagcacggcgcccagcacgaaatggatcaccagcgccgcggccaccgtgccgacggtaaacgttgcgctctgcagcacgtcctggcccatcaggatcccggcgatcatgcgcgtggcgatccacgggttcacgcccgacaccatcgacgaccagaacagctccagcaccagcagcaacgccccggccgccagccccgagaccgctgccgcggtccagtccggctgccgccgcacgtagtggtgcgattgcatgtgaagttccatagccacctccgtctctctcggtccgcggggcattggacttgaatgggaacggggccccgcgtctctgatcagcataggacacgtgtttcccgcttcgggggttcgcatggcgaaaaacgtggggcatgcgtacgcagcgcaacgcctgaaccgtcctaagtgcgcgcatcggtacctgggtggcatccgcatctcccgggttcgggacaatcccgatgcacgcagccatgcatcgggcacacactgcctatactggaatcacaaaagagagacaggagaccgccatgcacttcaccgcgcatgatcttgtattcctgattccgatggcgctggtaggcgtgatcgccatgggttcgatcccggtgactgccaagtacctgcgcatcagttgccggaccatgggcgccctgatcggcgcactggttgccgtgttggtgctagaggcattaccgctgctgatctgaccccagaggtcggacagacggtttttggggaggagggccgttatgtcgatcggcctgcttgctgccgtcatggcggcgctgctgttcattaccgtcttgcgggccatctggcgctgcagccatccgtaccggatgcgctaccggcgttgcgctgcacaacggcaacgcgccgggctgtgccggcatacgctgcgacggcacggctaggccccaacaagcgttcttctgcaccattgcccggtacgcgaaccgggcagtagtccatcatgccgtcggcgcgcgcaacgccgccagcggcgcgttcactgactcccccagccgctccatcagcgaatagcgcgccacgtagtggcggaagtgctcgatgaacgcggcctcggccggcgtctggcgccgctccggattccacagcaggtacatgtcgatatcggccacgccctcttcgggcggcaggcgccacagccgttgctgggcgacatcgtcggcaacgatatgttcgggcaggcagccaatgccatagcccgcgaacaccagccgccggatttcatcgaggctgggcgaggtcgcgacgatctggccggaaaagccgtgctggtcgcggaatacggccaatggcgccagcacgtcgccaagctggtcgctgctgaacgagacgaagtgctcggccagcaggtcggcaatggccagcccggtgcgcccgaacagccggtgatggcgcccgcagaagatggcatagcgctggcgcaggaacagcatgtgctcaagcccgtcgcccgactgccggcccggctgccggtacaggctcaggcccacgccgccagccttctgcgcgagcgcgtccgcaatctcggtgctgcgcatcacgtccacctgcagcgtgacgcgcggatgctgccgatggaacgcggccaggcattcgtcatagacgcctgaatggatacggctcacggtcagcagccgcagcaggccgctgacttcgtcctgctgctccgccagttcagcccccagccgcgccacgctgccatagacgtcggtggcgatgcgcagcacttcttcgccggcccgggtcaggcggaaattgctgccgcgccgctcgatcagcgtgtgtcccagatgctcttcgagccggcgcaaggccaggctcaccgccggctgggtgatatgcagccgcaccgcggcgcggctcaggctgcgctcgtggacgatggtcaggaaggtgcgcagcaggttccagtcgagccggtcggtcagcagggcccggtccagggcagaacgctccatcacgcaacgtataaattgaagttatatgaaaaataaatattagaaatttgactgatatttgtcaacgcgcgataactcctcccacagctgcccctgatgcagcggcacaaacatagtgaggagccagtccatgcaagtgtccccttccggcacgcgccagcccgtgcgcgccgccaccgccgcctttgtcggcaccatgatcgagtggtacgacttctacatctacgccaccgccgccgcgctggtgttcggcccgttgttctttcccggcggcgatcccttcctgagcacgctggcgtcattcggcaccttcgcggtcggcttctttgcccgtccgctcggcggcatcgtgttcggccactggggcgaccgcatcggccgcaagcaggcgctgatgatcacgctcatgatgatgggcgtggccaccatcggcatcggcctgctgccgacctacgccactgcgggcgcgatcgcgccggtgctgctggtcctgctgcgcgtggtgcagggcatcgccgtgggcggcgaatggggcggcgcggtgctgatggcgggcgagcatgcccccaagggccgccgcaccttcttcgcctcgttcgcgcagctcggcagcccggccggcctgatcctgtcgctgctggctttccgcgcggtcacgtcgatggagcacgaggtgttcatggactggggctggcgcctgccattcctggccagcgcggcgctgctgctggtgggcgtggcgatccggctgggcgtgaatgaatcgcccgagttcgcgcaggtgcaggcgcagcgcaagaccgccaggctgccgcttgccgaggtctggcgcacggcccgcgtgccggtgctgctgtgcatcggcgccaataccatcggcattgcgggggtgtacttcaccaacaccttcatgattgcctacaccacgcaatacctgtcgctgcccaggacgctgatcctcgactgcctgttcgccgtcgccatcatccagttcctggcgcagccgctggccgcctggctggcagagaagcttggcggcgcgcgcttcctcaagctggccgcgctgctggcgatggcttcaccctatccgatgttcctgctggtgcagacgcgccaggcgccggccatcgtgctcggcatcgcgctggcggtggtgtgcatggcgagcttctattcggtgatcgcgggctttgtcagcggtgtcttcgaaacgcgcgtgcgctactcggcgatctcgttgtcctaccaggtctgcggcgcggtggcgggcgggctgacaccgctggtggggaccgtcctcgcgcagcgcttccagggccaatggtggccgctggcggtgttctacaccttgctggccggcgtgtcgctgctgtgcatcgccagcatcgatgcacgccagcgccagcaaccacaaccggccgcgcaagccgcgcaggcctgacgcctttccacggacattgcaaaccccatgctgacgtttttccatcccgagcaattgctgcaccatccgcagagctactactcgcgcggcaggatgcgctcgccgcaggagctgcctgcgcgggcgcagcggctggtccaggcggcagaggcgcttggcttcgcgctccacgcccccgccgaccacggcctcgcgccgcttgccgcggtgcacgaccagccttacctgcagttcctgcaggacgcccatgccagctggcgcgagctgccggaggactggggcgacgaggtcatgtccaatatcttcgtgcgcgagcccaacgccctgcgcggcgtgctggcgcaggccgcgcgctatctcgccgatggcagctgcccggtgggcctgaacacctggcgctcggcctactggtcggcgcagagcgcggtggccggggcccgggcgctgctggacggcgcgcgccgcgcctacgccttgtgccggccgcctggccatcatgcccggcgcgacgcggcgggcggcttctgctacctgaacaatgccgcgatcgccgcccaggccctgcgcgcgcgccttggccgcgtggccatcctcgataccgacatgcaccacggccagggcatccaggagatcttctacgaccgggccgatgtgctctacgtgtcgatccacggcgacccgaccaacttctatccggtggtcgcgggcttcgacgatgagcacggccgcggcgccggcaccggccacaacctcaacctgccgatgccgcaccgttcgcccgagtccgtcttcttcgacaagctggacaccgcacgcggcgccatcgaacgcttccaggcagacgcgctggtgctgtcgctcggcttcgacatctaccgcgaggatccgcagtcgctggtggacgtgtccaccgcaggcttcggccgcctcggccgcgccgttgccgcactgggcctgcccacgctggtcgtgcaggaaggcggctaccacctcgattcgctcgccgccaatgcaacggccttcttcggcggcatccaacagtcagggacgggcgtatgaacgcaatcacgatcaatggcgaacgcctgtcgcaagcgctgatggacctggcgcggatcggcgccacgcccaggggcggcaatgcgcgtctggccctgaccgcgctggacgggcaggcgcgcgacctcgtcaccggctggatgcgcgacgccggcctggcggtgcgcatcgaccgcgtgggcaatatcttcgggcgccgggcgggccgcaacgacgcgcttgccccggtcatgaccggcagccatatcgacacccagcccaccggcggcaagttcgacggatgctatggcgtgatggccgggctggaagtcatgcgcacgctcaaccagcacggcgtgaccaccgaggcgccgctggaactggcgatctggaccaatgaggaaggcgcgcgcttcgtgccggtgatgatgggatcgggcgtgttcgccggcgttttccccgaagccaccgctttgacggcaaccgacaacgccggcaagtccgttgccggcgaactcgcggcgatcgactatgcgggcaccgcgccggtcggccacaaggttggcgcgtacttcgaggcgcatatcgagcaaggcccgatcctcgaggccgaggacaaggtcatcggcgtggtgacggggtcgcttggcctgcgctggtatgacgtcacggtgacgggcatggaggcgcatgccggccccacccccatgccgctgcgccgggacgccctgcatggcgcttcgttcctgttccaggaagtggcgaagatcgcggacgactttgcccccgatggccgggggacggtcggggtggtcaatgtccacccgtcttcacgcaacgtcattccggggcgggtacagttcagcgtcgaccttcgccatctcgatggcggccagctcgaccggatggaagcaaggctgcgcgcagcgtgcgcggcgctggccagcggcagcactacaggtgccgcgctggcggtggaagtcgaagcgatccagcgcttcgagccgacgcccttcgcgcccgagcttgtggcccatgtccggcacgcggccgcggcgcgtggctacacgcattgcgacatcgtcaccggcgctggccacgacgcggtctacctggccagggtagcgccggcggcaatgatcttcgtgccgtgcaaggacggcatcagccataacgagatcgaggacgccaggcccgagcatctcgaggcgggcgccaatgtgctgcttgccgccatgctggcgcaagcccggggctgagcccgcatgggtcggccggacaggaaagtgcgtgcggcgttacagctcgatcatggcgaattcggccttgccgacgtcgcattccgggcagcgccagtcctcggggatgtcttcccagcgcgtgccgggggcgatgccgtcttccggccagccctgttcttcgtcgtagacccagccgcagatcacgcacacccaggtcttgtaggcgacggcggcttccaattgatcctgctgcaaaacacactcctgaatcggctatggaacggattgtccgggccgaatcataccggttttccgggccgggcctgtggcggcgccgcaccgtgcggcgctgccgccccggctagccgcgaatggagaagtccacgcggttgggcgcgcccttgtccttgatgccctcggcgctgagcttgggcgcggtcaggaacagccggctctccgacaccttgccctcgcgttcgagcgactgcttgaccaccagtgcgcgttgctcggccaggcgcttcaggtcggcctcggtgaccgtggcgttggccatcagcagcttttccatttcctcgggcggcagggatttggtgaagccgacgaagttgcgcggcttcttcatcgatgtgcgcttgtagacctgctccaggtacttcgggtactcctgtttcgagaccttgatctcggcgccctgctcgccggcttcgtcgttgtcggcctcgccgcccacctgtgcgctgtcgcgctggtcgcgccgcttctgctcggccacgcgcgcatccagccacgcgcggcgcgcgccggcctcgtcggtggccgggtcgatgcggccgctgatttccagccgcagcgcgggcctgtcattgagcgcctggcccagcttggtgatcttgtccctggccgccggcgtcagcgccgcggtgccgggcgcgaactcgacatagcccagctcctcgcccccgccgccgccaaaggccgaggcgatcagcgagaacggcgacgtgatcgccttggtcagcagattgacgatcacgcgcacgatcacgccgccgatgctgaactccggatccgacaacgagcccgacaccggcaggttcacgtcgatcacgccgttgcggtccttcagcagcgacaccgccagcagcaccggcagcttggtcgcatccgggctgtcgacgcgctcgccgaaggtgagctggtccaggaacaggtggttgctcgcatcgagcttgccgttctcgatcttgtaggccacgtccaccgtcagcttgcccttggtgatcgggtagccggcgtacttggccgcatacggcgtgagccgcgtcagttccacgcccgaggccttggcggcaatgtccaggaacagctgctcacccagcggattgagcttgccgctgatattgaccggcgcatcgtcgtcgatgcggccatccagcaccaggtcggccggcgtggggtcgcccgacgacaccttggacaccttgcccttcatgccggtcaggttggccgtgtagttgggcttgacgaagaagtccgagaaattgatattgcccttctcgaccgagaccccgccgatgcgcacctgcggcttggggccgcccggcttctgctcgacctgggccgtacgcgtatcaccggtctgcaccggcggcgttgccggcgccgaggccgggttggcctgcgtcaggctggtcgatggcgccgcctcgcccttctcggcgccgccggccatcacgtcctgcaggttcaggcggccgttggcgttcaggatcacgcgggcatagaagtcagacagcgcgacattgcccaggctcacgcgcatcgggcccttgctctcgtccatggcgaagtcgatgcccgataccgccagcgaacgccagcgcaggaagtcttcgccgctgacgcggtccaccgtgcgcacgttgccggtttgcacgttgccgctgaactgcgcggcgatgggcttgccggttggcgcatcgacattgagcttgccccttgccgtcagcgtgccggtgcgcagggcggcgttgaagcggtcagccagatagggctggagcgggctcacctcgacctcgcgcaggtccagctgcagccggctggcggggacggtcggcaacaccgtgccatcgacgccgatcacgccgcggcgaccggattcggcatgcagcttgagcggcaccgccgccggcgtcagcggccaggcgaccgagccggtgctcagcgcgatattgcggaactggtggatcaccgggcggccgcggttggccccggccggctggtagtcggccaggcgggcgctgccgccttccaccgtgaccttgccgatgtctgccttccagccgccacccgctggcttgccgttggtggcgggtgcggctgctccattccggcgcggcgtggcgcgcacctgctgcgccgattcggtagcccacaggcgcgccatctcgatcagctcgccgctgtggtcgcgcgtggcagcgagctgcggcctggccagggtgacctggctggtggcgaaggtctgcttggccaggtcgaactggatatcgtccagcaccagtttttcagcctgcagcagcggcaggttggcgccctcgcggtcggcggcgcgctcacgcgcgcggcgtgcgctgcgcggggcggcattgtcgttgccggcgggtcttgcactggcatcggcatcgcgtgcggcggccggaaccggcatcgtcaccggatcgcgcgtggccacgtagagcggcgccagttccagccgcgatttttccagcacgaactggaactgcggcgtgccccacgacatgcggtagttcagttcggcattgaccgcggtagtgccgaactggctgcgcagctcgcgcggccaccatgcggcaaacccctgcggccgcaggccggtggtttccagcgtgccggccatcgagccgtcgcgcagcagcaggtcgccggcatggtgcagggtctggccatcggccacggtcagcgtggcctcgatcctggccggcttgtcgccgtcggtgccggcgaagcccttgacctcggcatcgagcgggccgagtgcaagcttgcccgggcccgatggcgccagcgcatcttcaaaccccagccgggcctgcctgacgacgatgcggtcgaccgcatagcgccacggcacgtcttttggcgccgccttggccggcgccgcctgcacccccgaggcggcggccgctgccggcgccgaggcaggcgccggcgcgggcgccacgccatccgtggatttgctgaccgcctgtggcaggaacgccgtggccaggttcagcgagccatccgcgcgccgcgcggcttccacgcccagcccctcgatctcaacgctgcgcagctgcgcgcggtgagccagcggctcgagcttgccgatatccaccgccaggcggccgctcttgaccagcggctggccgacgcgcgtgacgacctcggcatcgcgcaacgcggccgtgcccatcaccagcatctcctgcgtgtccttctgctgtcggaatgccacggtcaggcgcgtatcgagcttgccggacttgacctcggcatcgcgcagcggcggcgcgaacgccatcaggcgcgcgacctccaggccgtctaggttgacgttgagccgggtctggcgcgaatcggcaaacggcagcacttcgccgtccagcgccagcggcgtgccgttgacccgtgcgctcagcgtgggccgcgtcacgatctcgacgtcatgcggcaggttcgacaggaacggcagggtcagcgtcaggttgtcgacgcgcaggctggaaccgagctgcttgtcgtcatagccgaagctgctgccggtaactgcgatgttgttgaccgaaaagcgcgccggcttggcatcgggcggcttgggcggcagggcagcaagcttctcctggacgtcggcaaagctcatgcggccgtcggcgtcgcgcaccacgtgcacggccagccggtcgacgtggaggttgtccaccaccggcgccaggtgccagaccgaggccagcgaggtattggcctcggcctcgcccagcgtcagcgcgggggtcttgccatcgcgctcatagatagtgagatcggtcagcgtggccgccagctcgaacgggcgcacgtgggccctgcccagcgtaaccttgcgccccagcgcgtcggtcgcgttcttttcaatcaggtatttgagcagcggcgggccgccaaaatacccggccagcccaaacaccgcgagcgccgcgaccacgccgccggcgacgcgcgtcgtcagccggccgcgtggcgtggcagccactgcctggatggattgcttgaaagccatgtcgttccagaagatctgaccccgcattccggcgctgcacgatggtttgtgccccggatttcacatttttcgacattatggcaacggtttcggacaaagcaaagaaatcagaattgacccctcaacgctgcgtaggccgatctggtatctttacgccctttgcgaagcgtttcgtcgcaagcctgcggcttacccgccacatcgggcctgcctcccctgcgctgtaccctccggccacacccatcacgtattccgtgctgcgcgcttcgcatgcgatctcttccatgcgagtccattcatgtctaccaccagcagtaccgccgcaggtatcggcgcgccgcgagccagcgcgcgcccgctgaccggccaggattacaagacccttgcccttgccgcgcttggcggcgcccttgagttctacgacttcatcatcttcgtttttttcgcgacggtcatcgggcagctgttcttcccgccgtcggtgccggactggctgcgccagttgcagaccttcggcattttcgcggccggctacctggcccggccgctgggcggcatcatcatggcgcacttcggtgacctgctcggccgcaagaagatgttcacgctgtcgatcctgctgatgtcggtgcccacgctgctgatgggcctgatgcccacctaccagtcgatcggcctggccgcgccggtgctgctgctggtgctgcgcatcctgcaaggcgcggccgtcggcggcgaagtgcccggcgcctgggtgttcgtatcggagcacgtgccggcgcgccatgtcggctatgcctgcggcacgctgaccgcggggctgactgccggcatcctgctgggttcgctggtcgccaccggcatcaacagcgtcttcaccccggccgagctggccgaccacggctggcgcgtgccgttcctgatcggcggcgtgttcggcatcgcctcgatgtacctgcggcgctggctgcatgagacgccggtcttcgccgaactgcagaagcgcaaggcgctggccgcggaaatgccgctgaagtcggtggtgcgcaaccaccgcggcagcgtcgcggtgtcgatgctgctgacctggatgctgtcggccggcatcgtggtggtgatcctgatgacgcccaccttcctgcagaagctgtatggctttgacgcgcgcacggcactggtcgccaacagcgtcgccacgctgtgcctgacgatcggctgtgtcgtctccggcgcattagccgaccgcatcggtgcgcgccgcacgctgttcgtcggcggcctgctgctggccatctgcgcctatatgttctacacgacgatcttcacccgccccgacctgctgctgccgctctatgcgctgaccggcttcctggtcggcaccatcggcgcggtgccgttcgtgctggtcaatgcgttcccggcgcaggtgcgcttctcgggcctgtcattctcgtacaacgtgtcgtatgcgatcttcggcgggctgacgccgatggtcgtcacgctgatgctgaagcaggatccgctggcaccggcccactatgtggtcgcgctgtgcgtgctgggcatggtgactgcgctgttcgtcaaggaccgctcgcgcggctgacgcggctgctgcaaggaaaaagggagggcaggcgccctccctttacttgtgcgcgcttgatgcgcattggtgctgcccgacttcaacggcggtgctggctgaagaactgccacatcatcgtgctggcatccgggccgatatcgctgtggtagccatagctggcatcgccgccgctccaggcgtggcccaagccctccacttccaccagcgtgaccaggtcgcggcgccagcggccgaagcggtattcatgagaccggcccggcgcttcgtcctccgggccggactgcgcgggcgcaccggcgagccggtcttccaggccgttgtaagccaggaactgccgcgccagcagacggccattgaccggatggaccgcgtcgtcggccaggccgtggatcaccagcgcgggcatctcgggaccgcccggcgtcacgccggcggcatccagcagccatgacggatcggccgccgagccttgctgcatggcccgcaggccggcgcgcgggttgtcggcggcgccgatgaccacgccggaatgcagcgccgcggccgccaccttgcccgggtagcgcaacgccaccaccgcggccatggccgcgccggcggacatgccggccaggtagatctcgcgctcgcgcacgtcgtggcgcgcagccagcgcatcgatcagcgcggccaccgcctgcgcctcgcgtccgccctcagcggcgcccaggtcgaaccactgccagcagcgctgcacctggcgccgcaagggctgttgcgggtaggccacgataaatccctcgcgctcggccagcgcattcatgcgggtgccggccgacaggtcatccggcgtctggcgacagccatgcagcaccaccaccaccggcaacgggccgcgatgggccttggacggtatgtagaggtgatacgagagttgcggcaccagttcgcccggcagcggcgccaggcgcagcctgtgcgcctgccaggtaccgggcagggaacccggcgcgggtgctggccgggcgggccggaccttgcccggcgggcggtcaggccgagccggcgtgagcggattaagcgaatccacgcggtccagccaggacttcacctgggcttccgtgcgggcttgcgcacggctcagtcgccggatctgcgcgtgccagtcagcggcaaagcttttggtcatgaggactcctgatcgtgtgacgcgatctcctcctatgcctttattgttgcgttgcagcatatcacaatccgcattacgcccgccggcgtgctcccgcgcttatggcacaaacgcaacgagcctcgcccccgtaatgcgaaatttttaaaccagccatacgaaagaatgcagatcgcagcgagatggcttgcgttgccggcgttttatacttggccatcgtcaccggaggacaatgacaccatgccggacagcggcgccccagcctgcctgctctgcctctttcgccacgtttgccacaatgccgggccacaagcccccctgccgcacgcgccgatggcgctgcagccggagctggtagaggtgcgcaccggcgagcatgtgtttcgccagggccgccctgcgctgacggtctacccgctgcgccatggcagcgccaagcaggtctatgaatcgccgctgggctggcggcaggtaacgggtttttcgctgcccggcgacgtgctggggcttgagccgcacgaaggtccggtctatgggactggtgcaatcgcgctgcaggatgcaatggtttgtgcggtctcggtcgaatccctgcgcaccctcatgcaggccgccccattccgtgaaacggtgctggaagcgatgcgccgcaacgccgagcgcgaacgcgtgctgctggtggcggtggggtcgatgagggcgccacagcgcctggcgatgctgctgctcgacctcgccggcgagcaggcgcgccgcgacggcaaccgcgacggcgcgctgacgctggcgatgtcgcgcacggacatcgccagcctgcttgggctaaccctggaaacggtgtcgcggctgctgtcgcgctttgcctcggtcgggctgatctcggtgcgccagcggcacctgcgcatcatcgaccgcgacgggctggccgcggtctatgccgacctggatccggccccgcgccaggcggcggccagatcagaagcctacggcggggagttcggcgaaccccggctggcctagacggctggccggggcgcaggggccaagggctcagcggtccgccacgcgctgccagccggcaggcgaaaaactgcggatggccttggcgcgcgatgcggtgccgggcccgaggtcgcgctcatagaagacgcggtcgctgccgagcatgaagctatgcacgccggtatcgccatagcgggccggccaggcaatcaggccatacttggcgtcgctgcccttggccggcggcaggatccggtaatggtagccgtagaaagcatctgcggcgggcgtatccgggcccatggcaagcgcatcggggccgatcgggctggcgtcctgctcgctggccgcgggccagtacaggccgttggtcttgcccggcgcgctgatcaactgggtcgcgtagcgccccagccccacctgctccgcgtagcgctgctgggcatcggccagctgcagcagcgtttccatcgtcaccagttcattgcgcccgagccggcggcggcgcacttcctgctggccggcacgcaggtcgaactgccaaccgtccttctgctttgccagcggcacggggaaggtccatccgctctgcccgaccgcgatcagcgcgcggcgctcgccatcgggctgcacggcatggtggcgcgcccaggcgccaaggaattcgtacacgtcgtcgcggttgatggagccctccggcaccagcgactggtattgcttgcccagcacgcgctgcaatgcatcgccgtcgctgcgcgcgatggcatcacccagcgcctcggcggcagcgtcagggctggggaagacctgctgggccatcgccggcagggccagggacagggccgcggccgccgccagcgtgcgcagcgcgcgcgctcgggctgcggcagagaagggattagcggtcatgtgcatcatgacttacctccgaccatggccgaaatgttcgccgccgccgagccggcctccaccgccgccgcccagaccaccgccctggtgcccgccgccctggtggagcccggccgggcgcgcatgcggcgcttcccgctgcggcgtcgccgcgcgctgggtctgctggcgcacgcggtcgccgttgccggcatcgcgcagcgcgctgtcccggttggcattgcgcgcacggtcgcgggcctgggcctggtctgcgcgctggcggtcggcgccggccggccgcggattctgcacgccaccgccggcggcacccgggcgcgagcggtctgccaccccgcccgcatggcccggtatggattgcccggtacggccctcgaacgactgcgcggcgcgctcacgcgcctggtcgcgctcggaaggctggcgctgcaccccgccgccggcggcccccacgcgctggccgggttgcgcagcctgctggcggctggcgaggccggactggcgctgctggtcatagcgaccgcgcaccgccgcattgttgtagggcacgttgccgcggttggcggggttgtgctgccagttcacgttggcacggttgacgtccaggcgctggttgacgttgatgttgttgtagcggttcacattgatgttgacgtcgtggctattccagttgaacccgccccacatcgcatcgaccgccgccacgccaagcccgaagccgatgcccgttaccagtgccgtggcaaacacggagccgggcggcggcgggtaataggccggcggatacgcgggatacgcccaggtaccgtaaaccgtggtcgggttgtaggtcggcacgtagaccacttgcggattggccggctcgatctgcacgatcgtggtgccgccggtggtctgcgtcacgaccttctgctgctcggtcgtcttcagcgtgccggctttctgcgcctgcacccgcagccgctgcaccgaatccatcacgtcattgggctgggccaggaaagcgtcgccgaccgactgcacccactgcggctggcggcccatcatgtcgagcacggaggggaacgcggccagcgactgcacgctggggtcccaggcctggctggcgaccgccttggtcgcggcatcgccagacaggctgggattggccttggaccattgcgccgcagctgcgacgtcggccggataggtggcagccatcagcacctgcgacaacagcgcatcgggatacagggcaatcggcgcggtcagctggtcaagctgggcattgctcagcttggactgcgccatcgctggcccgagcggcgccatcagcatcagtgccaggcaccatgcgaagaggtgtttgaaacggtgcatgtcggctctccacaaatacgcaggtgacggcccgctgccggggggcgcctcagcggcgctgctgcgtgcattcctggcgatacgcctcttccaggcgcttgcggtctgcctggcgttccagtgtcggatatgtgcgcccgtcggcagtggttaccgacgacttgccagtggaccactgcggcccgccgggcagcgcgttgacctggtccagcaatgactggcagtgctgccgctgcgacgcagacaccttgccatcaggtccttccaccacggccgtggcttcgtccagcatccgtggcggcggcggggccaccatcggagtgccggcggccgcagccgccgatgcagcactggctgcccacgccgggacaaccaccatggcggcgcatgccagcacgcccgccttgatcagaaacttcgtcaaaccaatactccagaaccctccgcggcacgtggaagcgacaccgcggcgcattgcaagttgcaagaaccgtccgccgctagcgatccttgccagtgccattgcggcggccggtacggttgcgcatcagctcaagcttgagcagcgcatccgcaagcatactcttcagccgggcattctcttcctgcagctcgcgcagcttgcggccgtcacgtgcatcaccctggctgggctggccgtaacgggcccgccatccgtagaacgaagcatcgctgaaaccatagcgcgcgcacagctcacgcaccggcacgccgctggccgcctcggccaggtagccgcggatctgctcttccgaataccgtctgttcacgaatctctccgcatcacaacggcgggccacaagcggcgccagccgcgccgccaaccgtgccgactctggccctacgttagcccacggccgcgccaaaaagcaattcagtgtcttcgctgcgcgagttaagaaaattatctctgcacaagctgccgccggcgctggcgcgcattgccaaatttcgttaagccaatttggagtccagttagatcattcgcgctgcgcatcgcggaaacgaagatgccggccgcgataacacatgggcatgacgaccttctgcacggcagtgatcgtggatgaatcgcccggtggccccgatttcaagccatgtattgatgtacagacaaagaggtactaaacaaaattagaagactgccatcaattcaagtttctatgacttttgctgagcatgtattaagattcctcggcacaactaaatttcgcacgccttcgcgcggcgccctggcggcgccggcagaagagcggccaggcagcccgcaccacccagacgtggtgcgcgttcacgctgccaacagtaccgggcctgaaggatcgaatcgtcactgcgccatttgtcgacgcaagtcggacatttaggagtcgtgccatgcgttttcgcagcatcctgcccgggctttcgcccacctgtctttcatccggacatgcccgcagcgcgcgccgtgcatgccgcttgcgcctgtcactgtcagggaccggatcgttgccctgacaccaggccgcgcttgcgccctttgtttcgacgcagtgctgtaggtgtcggaccaacaagaaaatagagaaaacaaagtcatggatcgggagaagtcggaatgcgtcacgtcagcacgaagttgttgcatgtctttgtcctggtcatggaataccgggacctcagcgccgttgcggcctgcacgcagggacgcgtgccgacggtggcctacagcctcgcgcgcttgcgcgaaatcaccggcgatccgctgttcgtcaagcgcaacgggatgctcgaacccacaccgcatgcgctgcgcctggagcagacggcgcggcagatcctggccaaatggaaccagctggtgcgccccggcgagcctggcctgagcaagcgccgtgacgacggcagacgcgtttcgatcggcttttcatcgtcgatcggcgacccggtcatcaccgagatcctgaccgcactgtgcgagcagtttccgcgcgacagctttatcacgcgcccggtgatcgccgacgccacccttgccggccatctcggcagcggcgaactggactgcgccttcatcgtcgacagcggccacgatcccgaacgcgtgcgccagcacaacatcatggccacgccgcgccggctggtcagcgccacgcgcggcggcagccatgacgaaggcgaaagcgactggatcctgctgcaggaagactgcgaggccggcagcccgctgcgggccttcctgagccgccaggccagcactccggggcatcgcgagaccgtggtcccatcatggcatacccagatcacgctgctgcattcggccgggggcatctgcccggtgctggacttcaacgtgccgctggtcacgcgcgagcgcaagacgcgcctgctggcaccgccgagcagcttcccggaatgggccgcactgcatttctgggcaccggagcgcagcggcgacaagggcgtgctgcgcgacatcatggatgtcggcagcgccgtgctgcgcgcccctctcaaggccatcgacagccgccgcaacggccgcgccgcagcccacgcgcaatccgcactggcgtgacgcaacgccccgcagcggcggcgcccgcaaggcgctggcagccccatggcgccagcgcctttttctttggctgcgcagaagcggcggcgttcttattacagtcttgagacatttttccgagcgctgaccctgcgctacactcgcgccaatttgaccggtgcaggccgctgcgccacggcggcgctttgcgaatcctcctagtttcgccagaccgcgcggccgatatcctgcaatggcattgccgcggtccggccgtctcccgtttggcccggtcccggggcaatgcacgcagttgtctggcgtcgtattgtttggcgtcgtttttgcgccgcacgtctcgctgacgtgcggcgttttcttgatgccggcgctgccacgaacaagaatcgaggagcaaccagatgacattgaggatcctgcttgccgacgaccaccccctggtcagcgcagccgtcgcggaccgcctgcatacccagaccgggtgggaggtgtgcggctgcgtgaccagcgcgacggccttgctgaacagcgtggaaagcctgcgtcccgatgtcgtgatcaccgactaccacatgcccgcgcacggcgaaggcaacagcgacggcctgcgcctgcttgccagcctgcggcggcggcatccgtcgctggccgtgatcgtgctgaccatgatcaccaatccgctggtgctgcgctccatcctggacacccaggtgcacggcctgctgctcaaggactcgcccctgtcagaactggtgactgtggtttgccgtatccagcggggcttccactacatcggcaaatccgcgcttgaagtactgtcgcaggccgatcccggcaacccggccacacccggccaggccggcgcggagcgcctgtcccggcgtgaaatggaagtattgcggctgtacctgaccggacggtccgtgagtgagatcgccgtcctgctctgccgcagcgtcaagaccatcagccggcagaagaactgcgccatgcagaagctcggcgtcaccaacgaccgggaactgtttgaattcgcggcgctgaacggcatgctgctgactgcctgagcgccagcggcacgggcgcggccgtatcaggcggcgtcggctgcctgtgccgcatgggcctgcgcgtatgcaatgccggcctccagccgcgccagtccgcgcgacagctcgcgcatggtcgacggcgacacctcggcaagcacatcctccagaaaggctgagcgcagcggcatggcgtgcgccaccacctgctggccggtccgtgacagcgtgacgtgggtcacgcggttgtcgcgttccgaggtgctgcgctccacccagccaagttcctgcatggccttgagctggcgcgtcagcgcgccggggtccatgccgaccaggtcagccagcgccttctggccgatcgcgccctcctggtgatgcagcgcatgcaggatgcgccagcggggcagcggcagccccaggcgctgttcgaacgcggccgcgtaggcgcggtaggtgcggccgaactgctgcagtacggccacgctttgtcgctccagttccatccgttttcctcaggttacgttcttcagtcggctgccatggcgggcgccggcgcccgggtcagcttgatcgacggtacccggcgggcgcaccacacacccagcgcggcagccaccgcagccaccaccaggccgaggtggatggcgctgaccagcgatacgcgcgcctgttccagcagcagggcgccattgtgcccggcctgctccagctggccgagcaacgcgacttgcgaggccttgtcgatcagcacctgcggatccgccatgcgcgccgtccattgtccggcattggcggcggacagcgcatgttccacaccaccggtatagctgcgcgtgaccagcgtgcccacgatggcggtgcccaccatgccgcccaccatgcgcagcgattgcagcatggccgtggcaatgcccaggtgctcgcgccctgccgtctgctgcgcaaacaccgtcaggttcggcatgatgaagcctagcccgaacccgccgatcagcatgatcgtcagcaagacgccgtgcggcatgctgcgcgtggcctgcgacaggccaaggcaggacaccgccagcatgccaaagccggcatagagcatggtattcgggcggtggatgcgcgtgacgatgcggccgttaagtatgctgcccgcggtgatgcagaccaccagtggcgtgatcaggatgcccgcctccttcggcgaatagccaaagccgccctggaacagcagcggcgcatagagcagcagcgcgaacatggtgaagcccgtgaacaccgccagccggaacaacggcgccagccccgggttgcggaacatctccaccggcaggatcgggttggtacagcgttgctcccaccgccacagcgccaccagtgccaccgccgccagcaccagcaagccccccgtataggcatcgaacccgcgcgccggcagcagttcaacgctcagctgcacgcaccccagcccggctgcgatcagcaaggcgccgagccagtccacgcggatcggcccgctatgggcctgctggcgcaggtgcggcaggtagcgccacgcaaaccacagccccagcacgccgatcggcaggttgacatagaacaccgcgcgccagccgtaccactccgtcagcagcccgcccagcgacggccccaccgcattggcaatgccgaaagccgcgctcatcatcacctgccagcgcagccgcacatgcgtatccggaaacaggtcggcaatgcaggcaaaggcagtgccgaccagcatgcccccgccaatcccctgcagcgcgcgcgccagcaccaggaacggcatgctcggcgccatgccgcacagcgccgaggccaccgagaagaccacgatcgatgccagcacgaacggcttgcgcccgtaatagtcccccagccgcccgaacaccggcacggtgatcaccgatgtcagcaggtaggccgtggctacccaggcgtagtactcgaagccttgcagctcggccaccacggtcggtagcgccgtgccgaccacagtctggtccagcgccaccagcatcaccacaaaggccacgcccagcatggccagcagggattcgcgaaacggcagcacctggccgttggcctcggacttttctggctgtggggtcacttttattgcccgatcaatcgttgcgttgtcaagcattatagacacggttcggccagcgcgtcatggcgcgaccaaatttgacgccgcgcccatgccgccggcctacccgatttcagggatttccgaccattcctgcgataagtaacatcgggcttggccgcctgctggcacgcattgaccgacccggagagaatcccatgccccttccattgtccatgccgctaatgacagcagcctcccatctggtccaggcatactccatcgccaacattcaacatggacaggtcacccggctgacgggatatgggcgcccgatcctggatgccgcgtacgatgctgccgacgaactgcgagcctgctgtgacagaaagtaccagtggctggtctccttcctggattacctgcggcccagccagttcgctaccatcaaggtcgatgcaatcaagcgcataaatgccgcattcaacatcacagcaagcgccctcccggagatcaactccctgtcgcgatggaaagcgcttggcgaggcatgcgctcgcgtggcacagcaggacaggatctatctcgatcgcttctatcggactcgcaatgcccgaagcgcactgtcggatatcgaggaaatcttttacaccgccaacaaggaaggaatgggcgatgatgcgctgcgcgtgatgaaagccgtaatgcaaaacgggggcaacgctgccggcatcacgtccagaaccattgttgcgctggccaggatgctgcgtgcccatcctccgttgagcggattcatgggatatacgcgctgggggccgggcgaccatggcaatcccgatgccaacctgcgcgcccatgcgttgaagcatgtctgccggcaaccgttgctgctcgaagtcggcgttgccgaaaccatgttctggtgggatttcctgcgcatacagctgaccctggcagattacaaccgcctcgccgtcaacccgaagccactggttcaaagcctgtttgatggcctgaaccctctggctggcgaccacttgcgccgctttctcatccatcaggcattcaatgacgaacctcagcttgccgattttgccctgcaacaggcacttaggccctatcgggacgttgccattgaaaccagcagggtgctgaatcgggtcatcatccagagcaatggcgagaaggtcttcctcagcggcgcctcgggaaacatcttcatcatcggcaggttcgaaggcactgagctgggcatctcctcgtgctattgggcgactgatattgaaagcaagctcagaggggcaagatccaacatctgctgggaggtccgcaggtaggctaagcggggctggctccagattgcgggcggtcgcgtcgtcgagcacatccgcgcatccgggctcggcgaagcgctttcatttcacgaatttgtgaaacacgcaaaaaaaacgcctgctggggaagcaggcggcagggaaaattctcgcgacgggacgcacccgggagaatgcggagcgatcgggaagacgctccacaaatgcagtatcgcgcccggcgcgtgaccgctccatcaggcatgccttaaatcggccgtgtagttggcaccctgcgtgccgccttgcgactccagcccgtctgccagcagttccagttcggcatggaaggcctgccagtccggaccgatggcaaccagccccgagcgccggaccgcctgctccagccagcggcacgcctggctctgcagcgcatggcccattaccgacagcgccccggccaagccgtgcaaacgttgggcaaacgcttcggcgtcgcccgccagcagcgcctcggccagtgcgcgctggtcccgccgcagcgcgtcggcatgcagcagtgtgtcgccgcctgcatgcgcgcccggcgctgcccgcgtcgccatatgggtgccggacagatcttccagcagcttgcgcagcgtgcccagccccaccggcttggtcaggcatcggtcgatgccggcctgctggcatcgctcggagacatcgggccccacgctggcggtgacggcaacgatcggcgtggcgaggccggcatcgcgcaggcaccgcgccagcgtgaagccatccatgccaggcatctgcagatcggtcaggaccaggtcgtaatgccggcccgatgccatcaacagggcctcgggcccgtcaccggccagatcgaccttctgccccaggttttcaagctgttcccgcatcaccacctggttgatcggatggtcttccaccagcagcagcgccagctgcacggcaggcgtatcgtcgcgcgccggcacgggcgcctgcgttgccgtcacctccacgcctgccgctgccgcgatcgccgccagcaagccgcgccaggcatagggcgatgccaccaccggggtctgcgtcaggtccggcactgccggcgccatggccgacaccaccacatcggcgtcgttgcagcgaggcatggcctgctcatcgcacaccaggacatcgaccggcgtggccggcggcgcggcggggtcatacttgaccgcccgtgcgccatagaactgcagcaactgctccacgccctggtagagctcgcgcaaggtgacattgaggccgaccgtcagtccccgcaacgcggtccgcggccaggcatcggccggcgcctcggcgccagcgctggccagcggcaggctgacggtaaagcaactgcccaggccgggctcgctgaccagccgtatctcgccagacatcagcccgaccagccggcggcaaatcgacagcccgaggcctgtgccgccgtagtggcgcgtgtccggctgctcggcctggacgaagggctcgaacagccggcgctggtctcgcgcggcgatgccgatgccggtgtcgatgacgcggatttccacgccgccgcccggcttgcgcatggccgtgacgatcaccttgccttgctcggtaaatttcaccgcattgctgaccaggttgttcaggatctgttcgagcttgaccacgtcagccatcaccggctcaaccagcgaaggatcattgacgcacagcaggcgcagctgcttgcgcgccgcttccgcggcaaagcgccgggtcacgtcctcgacgatctcctcgacgcggcagggccgcaactgcaatgacatttgccctgcctcgatcttgctgaagtcgagcacgtcattgatgatgtagatcagcgactgcgacgcgtgctgcatgaccgccagctggtcgcgctggcgcgaatcgagccgggtcaggccaagtaactcgatgcttcccagcataccgttgagcggtgtgcggatttcatggctcatggtggccaggaacgaggacttggcgtggttggcggcatccgcggcgcggatcgcctcgcgcaggcgcgcctcgctgcggcgcgcgtcggtcacgtcgttcagcgcgcggagcacggccgcccgcccttcataggtaatctccacctggcgcacttccaggtaccgggtctggccgttgcggccgaccagatcgacatcgaagcagggctgcacccgcggcatgccttcggttgtggtgccctcgctcgtcagccgcgcgtcacaggcatcctgcaactgcgccaggccggcgggcgtggcctggtcggtgatcgagtgggccgcggcatttgccagcagcacctgccgggtgctgcgctcgacgatcatcaggcccacgccggccacttcgatcacgaagcgcccgagcgcatcgctttcctgcaggcgcaaggactgacgctgcgcagggcgcatgatgcggcggtcgatcagccagatccacgccaggatcagcatcgacagcgagccggtcagccccagcatccataaggcgttctgccggaactggtgccatacctggcccagtgcgatcacgccgaccgtgcgccagccccacgcgtcaaactggtattccagcacgacgacatagtccagaagcccttgccgtaccagcgccgaactcaccctacccgggcgcgtaccgggcgcggccagcgatgccgtgaccgactggccgagggtgccggccggcatgccatccgcactcagtgccatgccggcatcggtcaccagcacgaaatcgccgtcaatggtctgtccgtccggcagcatcggcgacagcgggaactccatggccagcaccgcggccggttcgccaccgacttgcaccagcgtggcgaaagtgacggtgcgcatgccgctgacccagtccagcgccggcggcagcaccaccgcctggcccggatgggcgcgcaggcgtgcgaccagcgcgtcattgcgcaggcgcgcgagcgtgtcacgcaggaaggtctggcgcacgtcatcgcgctgcatgagcgcgcgtgccgggtccagccggcgcgggatgacatagagctggtcggcctgcaggtcgaccaggtaggcgttctgcacgtcgcggtactgcaggttgttcacgcggaaggtgaatgtcatcacgtcggccaggctcttcagcctggcgcccggcgccctggcgctggcgggcgggaccagcagcgggatgtactgccggtcgccccggcgccgcaggcggtcggtccattgctcatcgctgacggcggcgagttcatcggccaggccgatatcggaaagccgcgtcagcgatcccagcgcgcgcacggtcagcgcctcggccccgtgcagctttgcctgcaattgctcggactgcgactgcagcaccatctcctgacgctcgaccgcctcgtgcaggcggtagcgcagcagcaccccccacgacaacacggtcagcccaagcacgcaggcggagaacaggtagaccagataacggatctggcgaatgctcaacggcaacgcggagctgctgtcgatcgacatcagccgtttcattgaatacctcgttttgacatcgagactgtccggagcgtccggacagtgcatgggtcgtagtgcacttggcaagcgacgtaccgggcctcacaacatgccgcgccggatggcaatggcggcaagctccacgtcgttctcggcgccgatcttgcgcatgaggctctgcttttgcgtactgatcgtcttgacggtccggccggtgcgcatggcgatcccggtcacggacatgcccgacaggtagaggcgcagcacttcgctttcacgcctggtcagcagctccgcccaatcgccgtccggcggaccgctgcagggcctgccccagatcagcgtgcaagcggtttccgatacggaagccagccccaggtatgccatccagaccgctttcatgatctcgtcgacaccgtccttggctgtcacgacattgcggcagccgtccttgagcaactgcagcacggcggcacggtcgacgacgttggcgatcgcgaccacgcgctgcccgcccagctcggcgagccgcgtgccaatgcgcgcatagccggaaggctcgcggtctttggtgtcccacagcgggtaacgcagtgtcacgacatcacacgagccttgctgcagcgcttgcaccaggctcggttcgtcgcccgccacgccagccagctcgatgcaggcgctggccgcgagccgccggcccagcaggcgccgcatgacaggttgcgagtccgcgatgatcacccggattttttccatggccgccttaggctccagcgttgtcgttcctgcattcaggatgaaccatgcgcctggctttcgaaatcagccaagcctgaaaaaagcggggatatttccgaggagaggaatagcgcacgcgccgccgcacgggaggagccggccggcatcggcgcagccagggatgctattcagcggagggaggggaaatgcaacgcggcccggggaccggccgcaaggaaggggatgatgccaggatcaggggccgcccagcaggccgtttgtcctggcgtattcgtagagttcgtagtcgttggtcaggcccagcttcttcatggcgatgctcttctgcgcgctgatggtcttgctgctgcggttggcctggcgcgcaatctcgatgaccgggacaccggccgcacactgccgtatcacttccagttcgcggcgcgtcaggaccggccgctgtgacggctcgtcgaggccgcccgaagccaggatcgcacgcaccgatgcgggctggtagctcagcccgctgaacgcggcacgcaccgccggcaccaactcctggaccggatcggtcttgttcaggatcacggaaatgccgaccttctggatattgcgaatcagcgccggattatccagcatggtcatcaccacgatccgggtggtgggataacggcggcgcagcatctgcagcattggcaggccgtcgccaaactggccgcccggcatggagtagtcggtcacgataacgtcgcaatccgtgctttcaagcaactccaccaactgggtcgaattggcggcactccccacgatctgcacgcccacttcgttcgccagcacccggctcatcccgtcaaggacgacggggtggtcatctgcaatgattaccttgatcatttacgatccccctgttttttatcggttctgcggccgcgtagcggtgcgccgccgaactgccggcattcaatgccggtcatcttcgctgctctgaatattaggagtcttccgagaagactgaattaaggaattccttaaatagtatccggccaattgcgtcgtgccgcatcctggctgcctttatcgctttcagggtcgtcaaagtatgctgcaagatacaacgccaggttgtcaacatgggcttgcacgaccgccagcgcctgggccgcacccagctccagttcccggcacagttcgacaatctcctcgccatcctcggcatgcgccatggcgcccctcatacgatgggcatggtggcggatcgccttcatttccccgctggctgcggccgcggacagttgcctgaaatcctcgcgcatggtgcgctccagcagcgccatgctggcaacgttatcctccacatgggcggcgcccgccgcgcccgcggccctttgtgccaggccggatgcctgtgccggcagcacggcgcgcagacactcggccaggtcgcccagcaggatgggcttggacaggtagcgattcatgccggcttcgaggcagcgctcggcctcaccctgcgcgatgctcgcggtgagcccgacgatgggcagcgtcgccccctgcgcacgcagcgtgcggctcagttcgtagccgtccatgccgggcatatggatatctgtcagcatcaggtcaaacctgtgctggcgcaacaccgcaagcccttcttcgccactggcagcaagcgtcggccggcagccaaggcgctcaagctgctgctgcatcagcagccggttgtagggatggtcgtcgaccaccagtatctccagccccaactgcggcgtggggtcgacaggcgcagccagcggtggcgcactgaccggcgtcatgccggccgccttgcaaaaagcccgcaggatgcccgcctgatgataggcactgaccagccagctgccagcgatctgctgtggttccgccgggccgtcggcgcgcgcaaagaccacgccggcatagccatcgggaatggcctcgacgtggcgggtggcgaccaacagcaccatccctggttccggcgccggcccgcggcaagcgatcgccctgcagcccatggcgcgcagattgtcgatggcattgttgcggatttcatcattttccgacagcacggccaccggcggcagcaccggctccacctgttcgcgcggcccggcttccggcaacctcagcaatacccggaagacgctgcccttgcccggttcgctctgcacggaaatgctgccgtccatcagggcggccaggcgtctgcagatcgacaagcccaggcccgacccgccaaaccgccttgcagtggaagcatctgcctgcacgaaaggctcaaacagccgcgcctggacctcgggcgcaatgcctggcccggtatccgccacctcaagctggatgccgatcctgccgtccgcatcgggcgcttcactctgcggcgcgcgctgcaggcgcacaatgacatggccctgtgccgtgaatttcagcgcgttgtcgagcagattgccgataatctggcgcacccgcaccggatccccgatcaggcaaggcaggccgggctgtggatagcacggcagcgcgatgcctttttgcagcgcgatcggcgcctgcgcgcgaaccgtcgattccagcaggtcgaccggatcgaacggcacggcgtccagttcgatctggccggcttccgcgcgggagtagtccagcaggtcatccagtatctgcagcaggacctgcgacgaggactggatggtcgacagcatctcgcgctggctgtgcgccatctgtgtcagggacagcagctccagcgtgcccagcatcccgtacagcggcgtgcggatttcgtgactcatggcggccaggaactgcgatttggcagcgcttgcctcatccgccagccgacgcgcgcgcgcgagagcgcggtgcgcttcgcgttcgccggtgacatcgtggatcgcacacagcagcacgtcttcaccctcgaagcgggtgtggcggccgactaccagcacgtcgcgtgcacccccatggccggatggcacctgcagctccagccgcgcgggctggtcgccccgccgcgccagcatctggtccagccacgggcggcccgcagtgcgcgtgtcgagcggcagccattgcgcagccagcgcgttctcgagccgtacatgggcatcggctgtgcgcaccacccgcaggcctaccggagcggcctgcatcacggtacggttgaagcgttcgctgtcctcgatccgttcggcgtcttcctgcatcggcaccaacatccggcgccgcagcatgccggcaccggtcagcaccgcaagcacaccaagcccgtagagcagaagcgcggccgccagcgccgagccatgatcggccagcgcctgcgacagcggataggcgtaagccgcgcgccagccatggtcgcgttccatgcggccaatcatcaggctgccctgctcgaaccagtaggctacgctttgcccgccgctgcccaactcacgcgccacccgctcacccagcgcttgcgggcgcagccagccggcgtcgctgccccggtacagcaggcgcccttggccatcgaagaacattgcccggctgcctgacgcggtatgcgtggcatccgggatactgacgtcgtccatcagcgcgcgtacgggaatggcagtcgcgccatacgccacgagattgccgctggcgtcaaggactggcagaaagcagctcagtatagggccccgctcgatggtgccctggtacggcccggtccacagcggtgaggcgaccggcgtctcggcttgcgcttcgcgcgaccggttcgccagcgctttggcccagttgctgacaacctcagcgagcagcggcccgttcaaccccggcgcacccggaagcgctggtgtcacgtatgcctggctcccgtcggcagccaggaaagccgagcgcatcctctgcggcgccttaccccagtacgcgcgctcgaagatggcgaatcgaacgatgtgcgaaaccgtggcgggacgctgcgccgctggcgcggacgtgcccatcagcatggtggcaggattggtcagtccaggcacttcgacggcacgggcactgcctggaggcacgcccgtcagcatggcttcgagctggcccgccagccggtcgctgcgcaccagccgatactccggcccggagatttctgccatgcgccgtatgaaatactcgtgcatggccttcacttccagcaccgcgccaaaatgcaagcggttggccgacgcctgttcccacaggatgcgctggaacaggctatggagaaacagggcaaggaagccgctcatcacgaagatcagcaggccaacgacaacggtgagcaggctgctgtgcacctgccggttcgcgcgcgacagccagctgaccattggcgggctccgtctcggcagcctgcctgacgccgcgtagcgcccggcgcggggatcggcaagcgcccaaagtgggtgaaatactgtctctgggattatgcatcacattgcagcacgacagatgtcctcaccaatcccatcgccggccaaaacaagaaacccagcgcggcagcatacagcgccgcacagggctcagtggcattacgcggagggactcgtccctactggtaggtcatggtgaacgtcattcccgagttggcggcgccggccgccaccgtgcttccggtctggtagtagcgtgccttcagtggaatgacgtagctgccaccagtgctggctatagtcgctcaagaccttggtggtccccagcggaaaacattgccggaatcatcgagcaactgcacgccgatgccggatgccgtcgaggaggcatcgagcgataccaccgagttggcggcatcgagagccggggtcacggcatcgatgcgatagctcaccgaagtcatgccggccgggcagttgttcagcgcgatattgaatcccggcgatgacgtataagtgcccggcccggcaaactccttgttctgatgcgtgcccaccggggtatcgcgcggcacgccgtatgtaccagtgggcgcggtgaagtccagtgtaccggcactcggtgtgcaggagaaggtcgcgccgaacgactgtccatgcagtgccaggcaaaacagcagcgcagctgccttcagtatgccgtgccatggcctggccgtcgcctggcctctgctcactgatcgtgtgaggacagaacaatatcttgtgcaaggcgccaccgcgctggctttgatatgggcttgtagaattcaacatcctgatgtcctgcgcatgccgtggctggcatgcattaagaaaatgggggcggcaccattcgctccagctttagcggcaaaccgcttccacggtctgatacgaggcattcgcgtctttttcaagcttcggcaggacatagtccagcttgcatgcttccgcaacggccctaccccacttcacgctcagctggcctgcatccgtcttcagcccgcgcgcaatgatgcgcccgccctgagcgacagtgccgacgctctggccttgtgcatcgaagacctccgccccgaacggcagcggcttgccatccggtctgttggcccgcagaagcgccgcacggccagggttgtcggtctcgaacttcatcttcacaatcgcgcctgcggtcggcgccacgttctgctgcgtcgtcttcagctcaacgctcatgggcagccccttcgggtcgatctcgatctggttggtggcgaatggcgtcagggtcggcaccacggcgtggccccaggggtccacgcgcaggccgctgccgttggccaggcgcgcacccgcggcatccttggcctcgatgatggccatggtgtcgcccaccgtgggcgtgaaggccacgccccccgcataggccacgatgccgccgctgatgcccaggcctgcttgcgagaagtcgcggcccttgctggcactggccgtcatggtcgccatcggcgacacatagccgacgttggcgccgacagtggctgcatccctggtgtcgccgccaccggtgtagccggcgttcacgccgtaggtgaaggcgctgtcctggcccagggtgccggtcactgtttcctgcagcgacgtgcccccggtggaatcgtggctcaggctggtcatcgagtacggcgcgtgctgacccttgcccagcgggatacccacgttgagcatcacccgggtgtcccacttgcctgagccgacgttgaactggcgcgacgccgagacgccatagttgatgcgcttgtagctgttgttatagcccgcctggaactgggtatcggaaccgccgcggttccagtagttctgcgtggagccggacaggtagaacgagccatagccttgcggcagcatctggttgatggtcacctgcaggcgcccgcgctggatgccgccgaggaacgtgccagggcccaggccgcgctggtccaggtcgcgcagcgccatggcatcggtcatgctcaggtagccgctgctggaatagcggtaggcggccagcgtcaggttggtgttggtcggtgccaccagcttgctgtacgacagccgcatgctctggccgctccggttgggtgcattctgcaggttggtccaggcctgggtcacgtcggcgccaaaggcgccgaagtccgtgttcagcgccccgccgcccatcaccgccgtgtagtcctgtgccgcgatgacgccgccgtagccggtcagcatattgctgatgccgtgctgaacggttgcctgcatcagcatcggcctgctctggatcgacgtattgcggtactggccgacggtcacgctgtagcgcgtgacgcccgggcgcagcgcattgacggctgcggcgtagggcacgcgcgaggtatggacgctgccatcggcttccgtgaccaccacctcgagatcgccgccgtagccggtcggatacaggtcattgatctcgaatgcgccgggggcaaccgtggtttcgtagatggtgttgccgccctggcggacctgcacgcgggcgttgctgttggcaatgccatggaccaccggcgcatagccgcgctgggattccgggtacatccggtcgtcgctggcaatctgcacgccacggaagccgaaactgtcgaacagggtgccgtcggtgaaggcatcgccgatgatcagctggctcctgatcggcgcaatcgagcgctgcaggttggtctgcacgctctggtagcgcgtgccctcgacgtcgccgtgcgtcaggttgcccagatggcgaaagcgccagccaccgaagttgagtccggcgttcaccccgacgtagctctgcgtggtcgatatcccgctggagtcggagtgatagacgttggcgttgtactgcaggcgcgccgcggtcacgccttcgtcccagtacttgggatcgacatagccgcgcgccgagcgcgacatggcgatctgcggcaccgagacgtccaggcgctgctcgccgttgtcgaagctggccgtggcatcggggatcaggtcgggcagcgacacgcaccccgtgtccagccgcgccgacgcctccggtgacaacctggccaggtccacgcccatgcgctcgatcgcggcacggtcaaagcacggctgcacgttgcggctgtcttcgcccacctggcgcatcgtcacttcggcacggcccaaccagacctggttgacgtacagctctgcgcgatagttgcccggcaaggccacgttgcccttgttgaagcggctcgcgtcgatgcgggcaccgccgggctgctgcaggaaggtgtcgttgaattccacttccgccaccagcgtcggcgcgctgttaccaccgggcgcggcccatgcccccacgccggcgaacaaggacaataccaccgcactggccggacgcagccgggacgggaaggaagaggtcttctgggttttcatgggtttatgccggatatctggccttgcgcgggcaagacttgcccctgccgctggttgcggcatcgtcaatcggagaaatcagctcggaagaacgccggacgcggcccggcgtgtggtcagcgcgaagcggccttggtggcgctgctgcccagtgcggcttcgccgcttacggcgccgccgtagtcattgatggccttgtagcgaaccctggcttcggtgccttgcgcaacatcgccggtcagcgggaacgttttggcttcgcccgggccgaccatgccgccttcttcaaacttcgcggtcttgccgccgccaaccagttcgaggttggcgaaagaaacgtgatacttgctggggttgcttgcctcaagcgccggcttgccgcctgcatgggtgacgcgccagctgatgctgccaggggcgtcgtcggcgttgccctccaggcccgcggggcggaagaaaagcttgatgcgcgagcggaaagccagctgcagcttgttgacatcggcttcttcggcggtgggctttggcgggatctccagcacattgagccagaacacggattcgcggtcctgcggcagtggctcgccggtgtagatgatgcgcagcgtctggccctttttcgggtcgatgcgcgacaccggcggcgtcacggtgaacggtacgtcgatggacgacggcgcagccttcgcgtcgcccttgtcgatccacgcctgcgtcaacgccggcgactgaccttcgttggtcagcttgatcgtggtctcggtgtcttttgccttgtagatgacccgcgtgcccgctatgaccacggaagcttgcgcgtgcagcgcgctcatgagccccagcgcaatcacgccggcggaaatcagggacttgatggacgttttcatgatggttgcagcggacttgaccgggtgaagcggcacacactcaatattcggaaggcgcggagcgcgccggtaacacgctccgcgccctgtggtaccagggcttactggtaagcgatcgagtacatcacggtcgagttggcggcaccggccgttgccgcgccagttgcgtagtactgtgcgtagtactccagcttggccgcgccgctgttgatggcgactacgccggaattctgcgcggcgtcggcaaagccggccttgatcgggctgttatcggtgccgccgttcagcaggcggatctgcacgttggtggcgccgccggcgtccacgatcaggttaccggtggtggtgtcggtggtcgggccagcctcgaagtaggtatgcacgttgccggtgttcggcgtgcagttggtcagggcgatatagaacggcgtctggccagcggtgtcaccagcctggaccagggtggaggccgaaacggtcggcagtgtcacggtaaagttcttgctgcccgtgccgttgccgttgatcgtgcaggtctgggcggtgatctgcccgttgaaggtgatctggccgtcggcatttgcggcatgtgcaaactgcgcgcccatggcggtaccggcgacgatcagagcagcgaggagcttggtatgggtcatgatgggtgattcaaataagttgataggtagatggctttcggatccaacggatcccgccccgccccgtgccgccattgaaccgccagatctgtgttgcagttgccggttgccccggggacagctgaactatatgtatggcacctaatgccaccaatcaggcaagccttagatcttgctcggaattttttcctttgccgcgaacagctcgccgtggttcttatgcgtcatgaggtgtaaatctgacttgccggcgcaaggcagatgtgcctgcgaagagcctggacggtgaggagacaggcgccggattgatctgcatcatggcagccgcattgaagcgccgcatctacgccaaagggtacgcgccgcttgcagcggctgcatggtgcaaaggccatctccgcagcatccgtccgcccttaactggccaaagtcccggccgtgccaacagcgccgtcacacgtcctgcgcggcaggcagacctgcagcgccagcccgcgcggcgccacgttgtgcgccgacaccgtgccgccatgcgcggcaatgcccgcctgcgcgatgctgagacccagtcccgccccggtcggatgccccggaccgctgcgtacgcggtagaagggttcgaacaggctcgccagcgcgtcttgcggaacgccgggcccgccgtcgacgatggcgatccggatcgccgtctcatcagcctgcagcgtcacggtcacgggcgcgggggggtcggtgtaccggatcgcattgcgcaggatgttctcgatggcgctgcccagcgtcgcggcatctgcgtcgacgatcagttcatccgggggagtccagcagatcgccacgccccgggccgcggcttcgaagcgggcatcggtgacgatgacgtcgagcagttccgccaggtcgatcgggcggagcaccggcgccatcgcatgcagccgcgccagctgcagcgtgcgttcgaccagcgcgtcgagccgttccgtctcgcgctcgatgcgctcgaactgcaggtcgagcatggcatcgcgccgccgcgccagttccagcgacaggcgcagccgccccagcggcgaccgcagttcatgcgcgatattgcgcagcagctgctcgcgccagtccatcaggcgctgcaggcggtcggccatggcatcgaaatcgcgcgcgagctggcccagctcgtcggcgcggcgggccagcacgggcggcgtgcgcgtggccagctcgccgtcggcaagcgcttgcgtggcttcgcgcaggcgccgcacggggccggtgacatgccgcgtcagcgcccagcacagcggcgccgagacggccagcgcgaacaggcctagggagagcaccacaggcgacaggtgcagcacctcccaacgcgacgaatcgaacggcaggaacagcatcaggagctcgccgccttgcggcagcgcgatgggttgcgggtcccaccatgacacgcgcgcgccaggcccgggcacatgcgcgacagcatggccgatcaaccccgcgcgccacatcggcaccagccggtcggccaggcggttgcgcagccgcgccggcaacgggcggcccagcagttcctgcagcgtgtcgtcgacaatgtagatgtccagcgccgaggcgtgcgaatcgatcgcccgcagccagcgctcgagtccggggcgcccctgggtctgggcgacttccagcgcatcctcggtcagcaccgcggggctcaggccatcgagcgcgtcgaagcggtaccaggccaccgcggccgtcagcgccatgccgatgccgacgatcgcggccatgcccagccagaaggtcaggaagttgcgccagaacagcggcagcggaaacagcgcgcgcacgcggcggcgccagttcacggcgcctgcaccagcaaatagccctgcccgcgcaggttgcggatcagcagcggcgaagtgatgccgtccagcgccagcttgcggcgcagcgcgctgatatgcgtgtcgaggctgcggtcgtagcgttccggcgcgcggcccagcgcgaaccggccgatctcggcgcgcgcaaccacccggcccggcgcccgcatcaggatttccagcacgcgctgctcggccccggtcagcggcgcctcggcgttgccgtggatggccaggcctgatgccaggttcaggcgcagcgcgccagcctccagccacggcgcctgtgcgggcgcggcaggcgcggcgcggtggaaacggcgcagcaccgcatgcatgcgcgccttgagctcgcgcgggctgaacggcttgctcaggtagtcgtcggcgcccagttccagccccagcacgcggtcggcttcatcgccgtgcgcggtgaacatgatcaccgggcgctgcgagcgcgcgcggtgcagcctgagcaggtccaggccgttgccgtcggggagcatcaggtccagcagggcgacgtcgtagtcgttgcgggccagcagggtctcgccctgctggcgggtgtgcgccagcgtgacggtgcagtgatcgggctccaggtactcgcgcagcatctgcgccagttccaggtcgtcgtcgatcagcagcacgcgcgcgagcggcgtgtggaagcacatcagcatgcagcttgccggggccttgcggacgtggacgtggccgccggtccccggttccgtcaagaaacgtcaagaaaacaaaagctatccaaagtgactggtaggcaccttcatctcgaattttaatatgagaatgattgttatttacagaagacagggaaaatgatgaagttcaggcaggtcgccgggatcggggcggcaacaagagcggcggcagggttgccagcaccggcgggcgtacaacggggtcaatggatgcggatgctggcggcggcatgcgccgcctccggcatgacgggagcctgggcacaggcgcaggcgctgaagacggaagccaccctcgccaccgtggtggtgacggcggccggcagtgagcaggacatccgcgacgcgcccgcgtcgatcagcgtggtcacgcgcaaagacctggagaacaaggcctatcgcgacatcaacgatgcgctggtggaagtgccaggcgtaatcgtcagcggcggcggcgaccggaccgacatcagcctgcgcggcatgggcgccaagtacacccagatcctgatcgacggcaagcgccagaactcgcgtgagacccgcaccaactccgactcgtccggcgtggaaagcagctggacgccgccgctgtccgcgatcgagcgcatcgaggtggtgcgcgggccgatgtcgtcgctgtacggctccgacgccatgggcggtgtgatcaacatcatcacgcgcaaggtgcccaggacgtggacgggcgagttgcgcggcgacgccacgctgcaggagaacagcgactccggcaatctctaccagggcaacttctacctggccgggccgctcaagagcgagctgctgggcctgcagctgtacggccagagcacgcaccgcatcgaagacgatatcgactacggcttccgcggccgccgcgccgagagcctgaccgccaagctggcgctgacgcccacgcgcaaccacgacatcgtgttcgaggccaccggcatgcgccagctgcgcagcgagaccgtgggcaagaccgtgccgccgctgccgcccggcaccgcctgcccgcgctccggctgccccacctcctccgagaccgactaccgcagcgagaagtacgcgctgtcgcataccggccgctggggcttcggcgtctccgacagctatatccagcaggaggagttcgacaaccgcagccgccggatgaagatcaagaacctggacctgcgcaccagctgggccatgccactgggcaaccatatgctgtcggttggcggcgaatacctgaaccagcgcctgaacgaccagaccggcaaccagatcgccggcggcccgaaccaggtcgagcgctaccagtgggcgctgtttgccgaggacgagtggcgcctggcgcagagctttgccctgaccggcggcgtgcgcatggatcacgaccagaacttcggccagcactacagcccgcgcttgtacggcgtgtggcatgcggccgagcgctggacggtcaagggcggggtgtcgaccggcttccgtgcgccggacctgcgccagaccgtggccggctggggccagaccagccgcggcggcaatatgtacggcaaccccgacctgaagcccgagacgatgttgtcgcaggaactgggcctgctctatgacaagggcaacggcctgcaggcgggcgtgacgctgttcaacaacgacttcaaggacaagatcacgcgcgtcgcctgcccggccacgcagtgcaccgacgcacctaaccggttcggcgccaacccgaccacctacatgaacgtggaccgcgcctactcgcgcggggtggaagccagcctgcgctggccgatcgcgcaagcgtggtcgctgaccggcagctatacctataccaagtcggaacagaagagcggccagtaccagggccagccgctgaaccagttgccgatgcacctgctggtggccacgctgaactggcggccgagcgagaagatcaacgcctgggcgcgcgtcaactaccgcggcaaggaaagccagccgatcacggggccgtcatccagcaccgtggtggcgccgtcgtacacctttgtcgacctgggggcgacctacacggttaccaggaacgtgtcggtgtttgccgggatctacaacctcttcgacaagcaggtgaactacaccgactatgggcatgtcgaggatgggcgccggtactggatgagtgtgtccgtgaaattttgaaggtggctgttcttgttgttgccatgcgattcggctgtggctcttggcaggcgtgggctgtttcgccggcgcagccggcgaaacagcccagtcaagagcgacaccccgaccgcattgagcagcaatccccaaatccccccaacgcgatgcaagcgcagtgtgcccacctcagctcgccaaatcatccgcccggcatcttgccggcacctctccgtatagagccatcaacgcgccggcaatcgcgttggtccagccaaagccatcctgcaacggatactcgcccccgccccctccccgggccggcccttcgatatgccggatgcggtatttctccaccagcttgcattcatgggtgtagagactggccacggtcgccagccagcgctgcgcaatctcacgcgccaggtcgtcatggccatagcgtgccagcccgcgcacggccagccattgcagtggcgcccagccattgggatggtcccattgctggcccgaagcacattccgtggtggccagcccgccgtcaaccagcagccggtccttcaccgcctgcgccacggcttgcgcctgcgacggcagcgcaagaccgagatagagcggcatcaccattgccgcggtcaggcacagccgcggcgcgccgcggcaccagtcgtagtcgacaaaggcgcccgcggtgtcgttccacatgtattgcaggatggctgcctcgcgccgctgcgccgccacgcggtaagcctccgccgcggcatcgcccgcctgctcgcacagcacggcgaggcgcgtttccaggtgccagagcaatgcgttgaggtcgaccggcagcatcgccgtggtccggatggtggcaaggtccgcgggctggccggtgggcgtggatggcgaatcgagccagcgcgagctgaagtcccagcccgattccgccgcggcgcgcaggtcgcggaacaccaggtgatgcggccggccgctgcgcattgcggtctccatgtcttccaggaaggcctcttcgcgcggccacgggcggtcgtcccagtagcggttcagcaccgcgccgtcgggcaggcacaccacccgtcggtgcgcgtggcccggccgcacgcagtcggcaccgtccatccagaaggcgtattcccggcgcagctgcggcaggaagtcgatggcgctggccaactgctcgcgctcgagcaggtccaccatcagcgcaaacaccggcggctgcgagcggctcaggtagtagttgcgcgtgccgttcggcaccaggccataggtgtcgatcaggtaggcgaagttccgcgccatctccaccatcaggtcgccgcgcccgctgccggccagcccctccatggtgaagtaggagtcccagtaatacagctcgccgaagcgcccgcccggcaccacgtagcggtgcggcagcggcaacagcgacgacaacggcggatgggccacgggctcgcgcgtcagcaccggccacaggccgtcgatatgctcgcgcagggtgctggccgggtctgacacgtagtggctctccggcacggtggcgcgggtgaaatgcgcctgcacgaaatcagccagacagaaacccggcgtgtcgcgcgtttcgcggtagcgtgccacgatcaggtccgggtcgcagttgggaatgcagtcagggaaggtcttgctgtcggcaaacaggccgctgtgctggacgtcgacgaacagctcgcagtagcgcgccgcgggcgacagcatgtcggcgcaagcgcagccgggcagcgtgtgcggcggcgggcagtcccggtccgtgaccagcgccggctgcgccgccgcatggaccttgccgggcgccgccgatggccccggcaccgcgccggcgccgtcaggggtggccggggccgtgcgcggcaccgtgctgccgccggcagtggcgccggacgactgcggaatggcgggttcggtctcgggcttgcctgtcggctgcatgggcgcctccctgcaccgggcgctgccggctcatgtggataggagccgcgaagtgcgggtaagttcgcggccgcccccgcaaagcgccccatgtgtcacgcaggcgcccgggcgcaggcgttcacacctccttttcgccatgctgcaccggtatcgccggcgcggcttcgcgcacccccagctgcatgaagatccaggccgacgcgcacgtgatcagccccatgcagacaaaggtggcatgaaacgccggcagcaccgccgtggaatcgccgccgaagcggtgctggaaggtcgccagcaaggcgcccgccgcggtcaccgccaggctcatcgacagcatctgcaccatcgacaacatgctgttgccgctgctggcgccggccccgctcaggtccttcagcgtgaccgtgttcatggccgtgaactggatcgaattgaccatgccgaacagcgccagcagcgggaccagcagccacagcggcaactgcggcgtgatcagcgcaaaggctgccatcaccagccccaccacgaaggtattggccaccagcacgcggcggtagccgtggcgctggatcaggcgcgtggccaggcgcttggaggccatgccggcggcggtgacgggcaacatcatcaggcccgcatcgaacggcgaatagcccaggctgatctgcagcgtcagcgggatcaggaacggcatcgagccattgccgatccgggcgaacaggttgcccagcagccccacgctgaagctgtggatgcggaacagccgcagcgggaacagcggctgcttgcgccggttggcgtgcagcccgtaggcggtcagcgcggccatgctggcgatcagcagcatcagcacggtggcatgctggaagcccagcccggccagcccgtcgagcgagaacgacagcgacagcatggcgatggccagcagcaggtagccggcgatgtcaaagggcccgatgccggtcagccgcgcgttgggcatatagcgcaccgtggccagtgcgcccagcagcccgaccggcacgttgatcaggaagatccagtgccacgacagcacctgcgtcagccagccgcccagcgtcggcccgatcagcgggccgagcatgccggggatggcgacgaagctgagcgcctgcaggtactgctcgcgcgggaaggtgcgcagcaccgagagccgccccaccggcagcagcatggccccgcccacgccctgcaccacgcgcgcgccgatcaggaagtttagcgtaggcgcgtaggcgcacaacagcgaacccaccacgaacagcccgatggcggtctggaagatggtgcgggtgccgaagcggtcagccagccagcccgatgccgggatgatcaccgccatggtcagcgagtaggcaatcaccaccgactgcatccgcagcggactctcgcccaggctgtgcgccatcgacggcagcgcggtgttgacgatcgtcgagtccagcgtctgcatgaagaagccgaccgccaccacccacagcatgatgcggcgggtgcggtcgtcgggctggggtgtggtcatgtggcgggctccgggccggccgggccccggaatcccggtatgcgccggccaaagccgacaccttaaaggtctatcgcggaacaggcaaatcgatgcgtggccaagcgcctcgctgccctagtccaggcgctggcgctggtcctggctgaaataggcaagccggtacagccgccacggtgcctgcgcactgtcgcggcaatagccatagcggaagatgtcttccagcgcgggcaggtcgtagcgcaggtcggtgaaccagacgcaggcgaccgctgcgcccggcggcacggatggcgatgcccgcatcgccgtgatggcggacaaggccggatagaccgcgaactgcctgaaatcggcaaagtccggccgcacccagagctgccatgccagcgcctgctcagccagcgcctgctcagccggcgcctccagcagctgcggccgctcggtccagaccatgcgcccgggcggttcgtaggccctggccatggccggcaggcgccccagcacctgccattgcggcacccaggcccgatgcccggccaggttgacgtgggcgacgcggtagtccgtctccgcgcgggcaatcagtttccagttgaacggagagaacggctggggcagcgcatccacgcgctgcgcctggataccggcagtgcgcaaggattcgttgcccagttccagcgcccgttgcctgagcacagcctggacgccgacataggcacacagcagcgccatgcccgccagtgccgcccgaccgcgccactgcagcgccagcaacagtgccaggaccagtccggacacgacaatgccgctcaacagcggatcgatcaggaagctggtgccaaggctgaagcgccgttcggagccgggatagaagatgcgggtgccatagaccgtgaccaggtccagcgcgatgtggctggccacgccgaggcaactgacggcgaacgcttccctccaggcctcgcgccggtgcgccgccaggcagaacaggccggcaagcagcgcgccccaggcggggagcagcagcagcgaatgggtcggcccctggtgccactgcgccaggaaacgcagcggatggaccaaaaaacccaggaaatcgatatccggaaaggcaccggccgcagcgccaagcagcaggcgttcgcgcgtgctgagtcgccggccgggaacctcggcgacagggatggcgagcgcggcctgcgcccccatcaaggcatgggtgatcgtgtccatccggaccgggctcccttgtcgccagggcggcgccaggccaggcgctcggcgcagcgcagttgccgttcgagccacgcttgcgtgtggccggaatccggagaacggtcgcgtagccaacagccaaaggtggaaaggaagattccggtcagcacgacctcgcccaattcgcggcgccagccggattcgggcaggcgcgccgattcccgcagccattgcacggtgcggctgatatgcagcaggccctgcacctgcagatgcacgtgctccggctgcagcttgtagcgcagcatctgggcggtgagctgccggtgcggggccagcgcctcgagccaggcgaggatggcctgctccaggcgctcgcggtgggacagggcggcccagccttcacgcgaggaagcgcgcacgagcgcaaggtcggcccgctcgaaccaggcctcggccaggtcgtccttctgccggtaatgccgatggatctggtccaggccgatgcccatgtcgtcggcaacgtcatgcaggtgcagggcatcccagccgctgcgctcgcccagcatcagggcaacctccaggatccggcctgccagggctgcgtcagcgttcatggctttgccatcctcgggaatgcgcgtccgcgctctaccttccagcatagagaggcaacccgtacgcgggcgcggatttcattgtcatgtgcacgatgctgccggatcggcgtgcagtcggggcttgcccgcctgtgcccggttcggcacctgcctcgacaatttccgcacgcagcctatctttagggtgtcagtccaggcgtcatcgacaagggccgccgtgccagccagcactcggcggcggccgcggtgtcgcgtggacagaggccgtacgcgcatgaaagcggattctcccccgaggcagaactacgaagatgccctgctcggcatcgtgcgggagatgtcttcggccatgcgcccgccggcagagtccgaagtgacggtcgcgctggacagcacgctcgaaggcgacctgggcttcgacagcctcacgcgcgccgagctgctgacccgccttgaacaccgcttcggcgtcagcctgccggagcaggtgctggcccaggccgacaccccgcgcgcgctgctgcgcgccttgctcgccgcccaggacctgccgcccggagcgagcggcacgcacctgcgccaggcccgccctgccccggcggcacaggcgcccgacagtgccgccaccttgccggacgtgctgcgctggcacttgcgcagccacccggagcgcacccacatcatcctgcaggacggcgacggcgcagacacgcagatcagctttgcccagctgcaccgcggcgctgcggccatcgcggccgggctggtgtcccgcggcgtgagcgcgggcacggccgtggccatcatgctgcccaccagccccgaatacttctacagcttctgcggcgtgctgctggcgggcgggattccggtgccgctctacccgccggcgcggctggcgcagatcggcgaccacctgcagcgccacgccggcatcctggccaacgcgcaggcgccggtcctgatcacggtggcacaggcgcggccgctggcggccctgctcaaggccagcacgggaacgctgcatagcgtgctcacgccgcaggagctggcggacggcggcggcgccccggtccatccgatgctgcgcacgcacgacatcgccctgctgcaatacacctcaggcagcaccggctcgcccaagggggtcgtgctcagccatgccaacctgctggccaacctgcgcgccatgggcaagaccctggccgtcggctcgcaggacgtctttgtcagctggctgccgctctatcacgacatgggcctgatcggcgcctggctgggcagcctgtactacgcctacccgctggtggtgatgtcgccgcttgccttcctggcgcggcccgagcgctggctctgggcgatccacaagtaccgcggcacgctctcgggcgggcccaacttcgccttcgaactgtgcctgcgcaagctggccaatgccgacctggccgggctggacctgtccagctggcgcttcgtcttcaatggcgcggagccggtgagcctgcagaccatgcgcgtcttcatggagcgctttgcccgctacggcctgcgcccgcaggctgccgcgccggtgtacgggctggcggaggcctcgctgggcctggcctttccgccgcttggccgagggctggcggccgaccgcatcgaccgcgacaaattcacgcgtactgccgtggccgtgcccgcgggcgaacacgggcccactggcgagcgcgagacactggaattcccgtcctgcggccggccgctgtccggccacgaagtccgcatcgtcgacgccaccggacgcgaactgggcgagcggcatgaaggcctgctgcagttccgcggcccttcagccaccagcggctatttccgcaatcccgtgcagacccgccagctgttcgaccgcggctggctgaacaccggcgactatgcctatatcgccgccgatgaggtctatatcaccgggcgcgccaaggaaaccatcgttcgcggcggccgcaatatctatccctatgaactggagcaggcggtcggcgccatccccggcatacgcaagggctgcgtggccgtgttcggcagtcccgatccggatagcggcacggaacgcatcgtggtgatggcggaaaccgcagagaaggatgtgcaggcgcgccgcgcgctgcaccggcaggcgctgaagaccgccctcgacgtgctgggcatgccgcccgaccatatcgcgctggtgccgccgcacagcatcctgaagacatcgagcggcaagatccggcgcgccgcctgccgcgagcgcttcgagcacggacgccccggccgcggcgtggaagcgccctggctgcagatcgcgcgctttggctggcgcgcgctgcggccggaactgcggcgcggccggcagaccgccgcgagcctgtcctacgcgctctacacctggctcctgttcgcaacgctggcgccggcgacctggctggcatcggttgcgctgcaccggccggcactgggctggacgctcagccaccacgccgcccggctgtttctcaggctgggcgcggtgccctggttcgtgcaagggcttgagcacctgccgcgcaaccggccctgcatcctggtctcgaaccacgccagctacctggacggcatcgtgctggtggccgcgctgcccacgccggtatgcatggtcgccaagcgcgagctgcagcgccagcgcattcccggcacctacctggccagcatcggcgcggacttcatcgaccgcttcgataacgtgcgcgagcacgaggatgtggagcgcgtggtggccgcggtgcgcgccgggcattcggcgctgttcttccccgaaggcaccttcggccgtgcgccggggctgcaggccttccgctcgggcgctttcctggcggccgcgcgggccggcgcgcctgtggtgccggtcgccatccgcggcacccgctcggtgctgcgcgacggccagtggctgccgcgccgcgggccaatcggcgtggtcatcggcagcccgctctggccggacggcgcagactggcccgccgccatgcgcctgcgcaacaccgcccgcgccgagatcctccattactgcggcgaaccggatgcgcggcgcacgacgcaccgggatgcgaggcgggcctagtgccccgcgccgcgaggaacttgccatgacatctgccgacggagcaggaccctagcggcatggatacctttgccaccgccccgatgtgggccggcttcctggtcctggtgctggggacgctggtggtggacgtgttcgtccttggcggccggcacgcgcaccgcgtttcaacgcgcgaggcgctgggctggaccctggcctggtcgacgctggcggtgctcttcggcatcgccctgtggtggctgctggccggaagcgccggacgcgagaccgcagaccgcaaggtgctggagttctataccggctacctgatcgagctgtcgctgtcggtcgacaatatgttcgtgttcgcgatgatcttcggctatttcgcggtgccgccggagttgcagcgcagggtgctgctgttcggcgtggtcggcgcgatcgtgatgcgcgccgtcatgatcctgctcggcgtgtggctgatcagcgaattctcgtggatcctctacgtgttcggcgtgttcctgctgttcaccggcatcaagatgctgttcgtctccaggcgtgcccccgatctctcgcgcaatcccatcgttcgcttcctgtgtgcgcatatgcggatcaccgcggactatcacggcgagcacttcttcgtgcgcgtcgacggcctgcgccatgcgacaccgatgttcctggtggtgctgctggtcgaggcgaccgacctggtgtttgccgtcgacagcattccggccatcttcgccgtcaccaccgacccgttcatcgtcttcacctcgaacatcttcgccatcatggggctgcgggcgctgtatttcctgctggccaacctggcgcagcatttccattatctgaagtacggcctggccatcgtgctggcctttatcggcgccaagatgctggccgagccgtggttccatgtgccggtgcactggtctctcggcgccgtcgccatgacgttgttcgtgtccgtcctggtcagccgggccagggccaggcgcacgcttgcgcacgccggggacgaactgggcggccactgcgccccgcgcgagcgcagggcagggaaccggcgcacataaggagcgattccatgaacaagatcctgcttgcgaccgacgggtcggcctatagcgacgcggccgcccgctacctggtacagaatcccctgttcagccgcgatttcgtggtgcacgtggtgcactgcgaaccggatgtggctggcgacatcaagaccttcatcgaccggtccaccctggatgcctggcatcgcgaacagaacgacaaggcgatgcagtccgtggcgagcatcctggacgaggccggtatcgcttgcgagtgccacggcttcgtcggcttcgcaccggcccgcatcgtcgagtacgcgggcagcatcggcgccagcctgatcgtgatgggctcgcacggccgcggcggcttcctggatgccatcatcggctcggtcgccaggcgagtgcttgcccatgcgcactgcccggtgttgctggtcaggagctagtgccctctgatcgctgagaaaactggcctgctggcggtttgcttcccctcgcaaaccaatgcctctagctggcgcggttgactgggaattgctggagtctggctacagatcgcagggcacccggcgcctcgccggattgtgcggccggggcgattttacctcggtggcttgcgcgccgccgcagtgaccgtaacagtaacgggctggtgctgtcattgccacagcccgccccccgccatcgaagggtgaaagcggaaccaggttaaacaggttcaggaagaagcccgcaataggccaacgccagcagtgacccgctgtcggcgctacgctcaaggtaatagcagactagcaggctgctgaagtactgccgcacaaacggaatgctttccgcctgtgcaggtaagcactgcttgatttcacaatccggaagctatgcgcccctgaatcgtttttttcggctgttgggcgcccgtttccggcattcttggcccgcttactgcaactgcggacggatttttcccagcgaacgcatgcgcacgaggtgtaggcggccatgctcagcacgaacatctagtcgcctcgcttcagtccgcgcaccatcacctggcgcatgcgcccgaccgtcttgacccagccgaagccttgctcgatcagcttgcgcttttgctgcgagatggcatatccctcgctgcgggcaatggcatcaggaaccgccgagcgccgacccgaggtgttttgcgccacatgcggcgtcaccttcatctccaggcaggcttgaatgaactcctgcgcgtcgtagcctttatccgcgcccacggtgacttccacattcagatcttcagtcacctgcctggcatcgttgatgcatgaccttcgcgggcctcgcgctcggcgtgtccgtccgcattggtcaccatggcgctcaccaccaggccgtggcggttgtcgctcagggtatagcccatgtagcgcagttcactcgcagtcttgcccttgcggtacagcctggcatcgggatcggtcttggactcgtgcgtgtcgttgctgcgcttgcgacccttgaagttaccgccgtcgttatcgtccttgtcaccgccgtccttgcgcacaaagctcttgtggcctgcccacgcctgaatcagcgtgccgtcgacgctgaagtgctcccccgacagccagttcttcttctgcgcgatagccagcacctcgttgaagaactcgatcacagcatcatgcttagtcagccgttcgcggttcttggtgaagaccgttggcacgcaaactggggcgtccatctatagcccgatgaaccagcgaaacagcaggttgtactgcgtctgctccatcaattgacgttcggagcggatgctgtagagcacctgcagcagcatggcgcgcagcaacttctccggcgcgatgctaggccggccacccttgatgtcggcctcgtacatctgcgcgaacaaccggtccatcttcaccagcgcctggttggccatggttcggatcgagcgcagcgggtgcgacttcggcacgaaatcatccagacgccgcatggtgaacaaactttcggtgaaggtgtctccgccgcgcatgaatgtggggttggatggggtcctcaaatcaacgcttcagccagttgtcacgctgacgtccgctggaggtatttcagcgacctgttaatccttgcttcaacaatttcatcctatccataccttgtggcaaatcattttgtcgccccactaatgtatcggatatgccgtccatcgatcatggataacattgtggttctgatagcccgttggtcgggggcaggctgattgccgtgactcaattccacagggcctaccgggttcgacacgttactgattcgagggcgcggcgtcagcttgcggccccttcgtatgtctttcacggactgccaacatgcccgtaagtaatgctctcgatgcgaatccaatcacatgagaatgccaacgtagtttgatttttgcatacaaaccgcacagatactgattcttccatatcctcccattcgaacttgtcgatgatgttctcatgcccccagtggctgaaggacaagcagctcaagccgacaaatgatagcttaatatgaaccacgtcatagttcttgggccatcggtcagggcaagattttggcttctcttcagttataagcttgaccgatagccgcggctcatcgcgcttgacatggacgtcagaaagttcagatccactaagtgacggaaactcaccatatatggaaatcatggctttgggattcattaacctcgcagttgtcttcatttcttattccggcaattgaaatggtaatgatcgtccataccatcgactttgcccgtccgagtattgtcttcggggcgtacattatggtgcgacggctggtcgccaacacctccttcattgtagtagtgccctgccgagtggtcttgaataatcacattcttcccattcaactgataggtcaactctctggtcatgatcgggtgcttgtcgttgccgaggatccaagcaccgcttgagtcagttaatggaaccattttctgacttgttggttgctgagacattggaatgccaagctgtcgccgaacttctctcagactagcgcgccgcgtctgactgcatgccagcccgagcggatcaacccagcttatcgggttcggcgcgtactgattcaggttcagcccgccagccagcccgatagggtctttggagacgaagcgcccggttcccggatcataataccggtgccggttgtagtgcagcccattctcgtgatcgtaatactgcccctggaagcgcagcggattctggatgccggccttcctcgcggcgttcgagattgcctcctgcgcggcgccccatgccttgtactgcgcgctccacgccagctcgcccgcctcgtcggtcagttcctgcggcgtgcccaggtggtcgcattgataccaggccagcgcctcgaacggctgcggcgcaatctcgcgggtccacagcggatcgtcgtccaggtcgtagtcgccctcccaggcgggttcaggcagcaggtcgatggcctcgcgccgcaccgcctgcgccagcggcaccaaactgcccggctcgtacaggtagtgcgtggtgcgctccgcacccggtattatccggaagtggtcgccgacaccggcctcgggttcctggcggctctcccacgcaagttggtcaccgtcccagccatacagcgtgaaggcgcagccgtattcctggttcagccgtgcccgctcgttgcgccggtagatttcgccgtcattctgattctcgaagtagttggccgatgacgacttggacagccgccgcccaagtgcgtcgtaccggtaacgcacctccaccttcggattgtgccagcccaccagccggttgaaggcatcccaggcgaagcgctcatggacaccgttgaccacgcgcaaactcaggttgccgcgctcgtcccactcgtagtgggtaccggcgtactgcttgagcaggttgtccaccagcttcgggcggccttgcaggcggctgtggaactcgggccggccacgggccgggtcggctttgaatacgcgcgtgtcggggtcgtgcagcagattgcccgccgggtcgaagtcaaaggtttccaccccgagcgcgctgttggcctccagcaggcgccccaccggatcgtagcggtattgcagcgtgccgcgccgcaggtcgcggatgctggacagttgccccgccgcatcgtattggtactcgcggcgcagcatgcgctggcccgcatgggcgccctcgacgtgtgaaagcgtctgctccaggaggcgtcccgcggggtcgtacacctgcgactgcgccagccggttgccctgcgtgcgggcaatgtcccggtgcaggttgtcgcgctcgaactgcaccaactcccggtcgtccagcatcacgccgtgcacatggcccgagccgtaggtaagcacgcccacgcggtgcccgtccgggcgaacggtggcgatgcgctggttcagcgcgtcgtattcgtgccgccacacggccaccagcggctccttcaggcagcggtagtgctggtgctcgcgtaccacattgcccgctgcatcgtggaaccattgcaggcggctgtcggcgttttcggccaggatcaggcgcccgttgccgttataggcgaaggtttccgtcagtacatgcggcacccggttgtcggcgtcaatcagccccgcacggcggcgcgtgaggcgacccatggcgtcaaagacgaaatccgtcatcagttggcccgagtccaccgtccaatccagcaagccgcttgccgggtcgtagttgtactcggtcgtcttgccgtcgaaaccgctctcgcgcagcaggcgccccaccgggtcgtactggaattcggtgctggcgctgttctcgttggtgagcgtggccagccgtcccagccggtcccaccggtagccgagcgtctggccggcggcgtcggtgcgctcggcaatcagaccgacctcgttatagcgccaggcggtgcggcggtgcagcgcatcggtgtgcaccagcagccgcccctcggcgtcgcgctcgaagcgctccacccgctggtcgggatgggtaacgctggcgagctgcccggcctcgtagtggtactgggtggcattgcccgccgcatcggtgaacctgaccagttccccgcgctcgccgtacttccaggcgctggtcttgcccgagcagtcggtgtagctggccagctgtccggtggcggtgaaggcgagctgcttcttgccgcccttggcatcggtgatctccaccggcaagcccgacttgttgtaggcgtatgctgtcttgtgcccgagcggatcgatttcctcggtcaggttgcccttgatatcgtaatcgcgcagccacagcccgccctcggcgtcgcggatcttgatgagctggtccttatcatcccaggcgtagtgcaccacgctgtcgtcggggcggatgtgttcgaccagattgccgcgctcgtcgtaggcatagcgatcgaccgcgccatcggtgtgcacatgcttgaccacgttcttggcgtggtcgcggaagaaccactccgacaagccatccgggtgctggatgcgataggtgtagccgagaatgtcgtagtaatgccaggtctcgttgccatgggcatcggtaacgtaggtcagccggatgttctcgtcccactccaggcgggtatcgaaactaccatcgtcggcccattcgcgcacggccctggcgtccgggccgtcaccttgccactgcaggttcatgccgcgcccggtgcggtcggtatagcgcgtgacgagatggtgctgataggtgtactcccaatgcgcggcgttctcgtcctgcgccatggtgaggtcgcccgcatcgtcgtaggtgtagcgggaaagctggcgcaccagcttgctgtctgcgatctgccacaactcggcaatgcggcccttggcatccgggcgcacaccaacgtgggcgaagacggtctcgccctgataagcgatcacgtccgacagcacggtgtcgccgtcaatgcggtggtcgtagtgcagcgcgacacctgcaccgcttctaagcgtaatgccggtcaggcggaagcgctgaccatggcgccggtaggtttcctggctctcgaagccgcgcgccagcgtcaggccgttctccgacacccgcaccagcgtcacgttatcgatggggtcgtggtggaacttgcccaccgccggcagcgggtagtcgtggctgcgcccgtcggcggcatggtagcgcagcgcttcctggccctccttgcgtatcacatcaaagcgcgtggtgtacggcgtgatccagcgcgcgccctgttcaccgccgtcataggcgcccaggctggagcggtaggtgcgcgcccagtcgatggggaacagccccggcaagacaaaatcggtgtgcgacagcgtttcgtcgcccattgcaaaactgatgctgttggtgctgcccgccggcgcgggacagttcttgcagcgggggctggccttggccggcgcctggtggctgctcacctccagttcgccttcgtggccggtcttgcgggcctggctggtttgcttcgggtggacgttggcggcctgatggttgcctttcctcttgcgccaggcagccaccgcctggaccagcatcgacagcagccagccaatgctgtgctgtagcctcgggtcggcgagcctggtcatctgcgcgcgcagcacgggccccatggtccgcaactggccgacatgggccaccaccgtctgccggatttcggccggcatgccaaccttgaccgccgtgttgacaacggccttgccagcggccttgtaggcgttccaggtagcgttcaagaagttgccaatggccttcttgggatcatgcaggagttggctggcaccttctcgtgcctggctgaccgctgtttgcgcattgccggcagcgttgagcttgcccagcgccaccttctccaggccgccggcgacctccagcaccatcttctcgcccagcaccccggcatcattgagaatggtggcgagcttggcctgcgccttggccacgaagtcatcgatctcaccgatgatggtggcgttcaggtgcccgaccagcacctcgatgatcccatcccccagcgcggccttggccgcctggcgtagctcctggcgcaccagcgccagcgtcgggcgcaggctcatcctcgcggcggccatggtcggcggcgcgggcaacacgccgatcaggttgatgcccaggctcacccagtccaggaagttctgcgacttggtgcgtaccagcgtgacgacatcgcccaaggcgtcgaccagcgcgataatgttgcccaccaccggcaggctgcccgccacggtcttgatgcgctccagcgtcacgaggccgccgctggcgctttgcagccaggcgtcgaacctggcggcgcccttgccgatgtcctcgagcgcgatggtgttcaggggcgcgacggcggtttgcggctcgcgcggctttgctgcgggtgtaggttcagccataggtcaagtcaaggattgttcgtattcttggctcgatgtgctcagacaaagccgggcacgcgcatcgtggtctgcgtgggatgcgggctggccttggcaagcgtcggcgtgcctgcggttggcatggcctcgcccagcaggctctgcgcaccggacaggcccaggccaaccaagccggcaggaccggccttgaccgcgccggccacttgttgcgccagttgcagtgcctgggtggcctgtccagcggctgccagcacctggcttgccatggcgccggcggcggtgccgacagcaatgcctgaagcctgcgtcagcgcgcctgcgccgtcggccgatgcgccggccggcggccaggttggcttggcgacatagctgccctcggcccaggtatcggtcgggtccttaccaaagctgaccctggccgggcccggtgcgatgccgctaaccgccgcgaagcccttggtgtcgagcttgccagtggtgaccttgcccaaggcgtcctcgaccgtgaagtcgccaccatcgatacccaagcggttggcgtagtgattgaacagttcgagattgcccttgccgggcttgggcggctcggggaactgcgcgacatacttctgcgcactggtgaaggtatagctggccgcgtggatggtgtatgggccgctcgtcttgtgggtgatgccgcccgcgttgtagatggtggcgctgccaccgcccgccaccaccagttcctccttggccgacagcgtgatgcggttggccgtggccgtgacgttcagcttcgccagcaggttgatgctgtcctgcagcgcgcgcaggtcgatgtcgcccccggcggcgaccagccgccagcccatgctctggatgaagatgcgcacgccccggcttacgctcgccagcaggcgctgcccgatggcgaggctcgtgtgcccggcgctggtgaaggccaggtgctctccagcggcgaagtgggtcgagcgcgcggtactggcctcgatgccggccgggctagccagtaccaggtggggcgcggccagttctgggaagtcgccggtctcggcgttggcggtaccattgccccggatgtcgtcgttctgcgccttgatgatcttcgcgacctcggcttggtcggtgcactcttgcgcgtcgtgttcctgcgccagttccgccagcgtctcctgctggtcacgcgccaccgtgaggcgctgcaccgtctcgcccatgtccttgtggtgggcactggcgttggcgcggggctcggtggtaagcagcatgccattggcacgcaccacgccctgcgcgtcggagcgcagctcgaagccttcgccacgcttgtccttgcggccactgccgcggatgatgcgagtgaggaagcccagccccagccacgaggtctggtggtcactctgcagctgggtctggatctgtccttcgctggcgtcctgcacaaaggtattggtgcgattcccgtgcacctccttgctgacgaagcccgacagcgcgtggaactccggtagcggccactgcggcatgttcagcttgttgggcacgctgccggtcacgatagggcaatccggatcgccgttcaggtgctcgaccatcacctcctgaccgatgcgcggcacgtgcacggcgccgaaacgctcgccctgccaggacgaggccacccgcacccagcatgagctattggcgtcgcgcttgccttgccggtcccagtgcagctgaatacggatgcgcccgtactcatcggtccacgtttcctggccctctggaccgaccacggtggcggtctgcggcccgtgggcgcgcggcttgggctgggtgcgctcggggcggaacagttcgttggacggctgggcggtgaatgccacctcgcagcgccacggctggctgccgcccgacgcttccggtacgtcctcgatcagcaggtgcgtgccgagaatgatgtattcgcggttggccttgggctggatgaagttcgccagcgtgaaggtgcagccgggcaccatggcgcgcacattcccgcgcccgctggcgcggctgccatgctggcgcagcgcttccatgcgctgccgggccacctggtcgccttccttccacgggtcgttgccggtggccggctggctgtggtcgccagggaactcgtagatttcctggccggcgtgcgcggtgtcgagtggatcagcagcgcgtaccgtcaagtcggcccgcgtcttgacgaaatcgtagtcggaactggtccactggcccgacaccagccggtcgtgcagctcgaactcatggaggtgttcctcgtcgatgcggtcggacgagcgtgcccagcggatcgaatggtaggcggagctggcaaacggggcaaaggcgccgttgccgtcggtcagcaccagccggtgcttgccctcgctgtgttcgatgtgccaggaaatcccccattcttgagtgaggcgctggaagaagtcgaaatcgctctcgccatactggacctggtattcgcgtttggggtagcgcgccacgtccaggcgccgctcgaccgggaaggtatagtccgagagcagcgtgtcgaggatttcgacggcgctttgctgctggaaaatgcggaagtccttggtcagtgtcgccagccacagccaggggcgcagggtgaggcgatagacaatctggtgaccgactgcaatggggcctcgcacatcggtgaccatgcccgtgatttctcgcgtgcccgcgccgacaccgcccgccattccggtgcccatgccgtcgagctgaatcgtgacggtcagctcctggccgcgcagcgccttcgtatcgaggtccgccgccgggccgaacagcgcttggcggtcgtccggcgtcttcagctccaactcgtattcgaacagttcgcacaagcgctcggtgccagacagcttggaaagcaccaacgcgggctgccccatcaattcgggcaggccattgcccttgacagtgacggtacgagaggaaagcgatcggctgcccatgcaaacacgctccgtgagaatggattggtgactgccacaggcagccaatggctagctattttgcggggcgatcgctgcgcccgcacttgatgcgcatcaatacgccttttatatggaagtggagtccagccggatatcggacgtttcctataaatgaatgcgatctatttaaatcagaattaaaaaaaatctgagttttcaggcgggattttcgttggctggtatgagcggacaggccggcgcgcgtgagtctcccgcgatgccatgacgatttcttgcaatggaggttacgcggtcagtgtgtgccaccagcgcgcctgcgtcgtacttggcgtcgctggcgagcgagttgtcgatggtggtgagagcgtaggggggagcacaccaacggtatgccggaaccagtggcattagcccgctctgagggatacaggacagctttgccagcctgacggcatagagtcctgatccgcaggctgaccgctatccggcgcgcctcaaagggcagcgcgcagccccaggaagaagcgccgccccggcgcgggttcgaaataccgcccgttggcctcgttgacgatcaccgagccgatatagcgccggtcggtgaggttgtcgatgcggccgaagacgtagagccgggtcgggccgatgcggaactcatagccggcgcgcaggttgaacaccgcatagcctggcgcggcctgcgtgttgagatcatcggcgtagacgcggctgtccacgcgcatctctgcccccagcgtcagcggcgcagccggccgccatgacaagtccgcgcccaggctgtggcgcgcggtgccgggcaggcgcttgccggccgccacggtctggccctgcgcgttgacgaagctgtcgccaaagtaagcatcgagccaggtataggccagtcctgcctcgatacggctgccgccgcccttgcccggcgtgcccacctcaccgagaaagccgccgcgccagcccagttcgaagccgcgccggtgcacgccgctgacattctggtagacggtgcgcccggcattgttcgattggggcaccacctcgtcgtggctgtcggcatcgaacagcgccgcctccagccgctgccccgccgcctgccacttgatgccgatctcgccctggcggctggtggaggcctgcagccccaggttgctgcctacgccgccgggtccgtaggcgacttcggtcagcgtcggggtctcgaagccgcggccgaggttggcgtagacgttgagggaatcgagcgcgtgccacaccacgccaagcacggggctgacgttgctgtaggtcgcgctgccactgtcatcggggctggccgcattgatgaagtggtcgtcaatgccaagccgcacccggctggcgcgcacgccgcccaccagttgccaggccgggtggaaggtccagtcgaactgcgcaaacgcgccgaggtcggtcgcggtattggtctcgtcgcggcgcagcgcgccctgcgtgccgttctggttgacgtagccgttgcggccatcgcgcatgccgttggcttcgagcccggcgctccacagcagcggcaggccggcggcggtggcggtgcgccggctccatgacagcgcggcgccgccgtaggtgcggtccaggtcgacgatgccgccggccgaattcggcgcggctccgctgaagcccagccgctggtacaggttgcgcgtgccgccgtacaggcgtgccgacacgctgtcggtcccggtcagctggtggtccaccaccacgccggcctgggtctgctcgacgttcttgccggtatcgaactgggtcgccgcggacaccgcctggcgcggattggcatcggcctgcgcgcgcgttagccccagcgggtcctgcgccagcggctggttgaaatagttgaactggccggtcacgcgcgtgccgctcgccggctgcgccactaccttggcattgagctggtagcggcgcgccgcgctgtggtcgcggtagccgtcggtctggtaggtccaggcgtcgagcgagccgccgagccggtcgttgccgccggccagcgcgatgcccgcctgccactggccatcggagccgaagcccgtcgacgcgcgcccgctgaagccgtccttgggcggatcgggcgtgaacacctgcaccacgccgcccgacgcattgccatacatctgcgcaaacgggccgcgcagcacctcgacccggctggcgttggcaaggtcggcagtggaagcctggccctgcccgtccggcatggtggccgggatgccgtcgacatacaggcgcacgccgcgcacgccgaaggtggagcgcgtgccaaagccacgcaccgccagttgcaggtcctgcgagtagttctgccggtcgcgcaccgccacgcccggcacgccggccagcacctcggacaggttcaccagcggcgtggcgctgcgcagcggatcgaccggcacgctgtccaccgccgccggcgcgtcaaagcggcgctgctcgctgcgggtggcgctgaccaccacgtcgggcagcgtttcggcggtggcggcggccactgccgtgccgggcgggtcggcggcacgcgcgccggcgctggccaggaccagcgcggcgaacgccagcgcggagcggttcgcgaacgggatgcgggggataccggaacggcgctgctgccggaccgccaaaatctgcctgccgcctggtttcatgggatcggaagcggttgcgggttctggcgcggaggatggaggcgccgggcacaggtgaatgtgtcgcaactttatcgtgtccacagcactattgccacgcgcttggccgcggggaaaacccgcggaggagatggagccggcaccggattccggttgttcagaaaaattcaacaactgattgcatggacgctcacgcagtccgccccacggctccctacactgctttcaccacccgccgcaaccgcaccagtccatcacgcgatgcagcataagggtattcagattttcgctactaccaaggggatccaccatcatgaccaccgcacaaacccgcgtcgccatcgtctaccacagcggctacggccacaccgccaagcaggcccaggccgttgcgcgcggcgccggcaatgtcgcaggcactgaaagcctgctgatcccggtcgaggacatcgaccagcactgggacacgctggaacaggttgacgccatcatattcggcgcgccgacctacatgggcagcgcctcggcacagttcaagggctttatggacgccacctcgcgcaatgtctttgccaagggcggcaagtgggccaacaaggtcgcagccggcttcaccaacgcggcttcgcgctccggcgacaagctggccacgctgcagcagatcgcgatctttgcggcgcagcacggcatgcactgggtcaacctgggcctgcccccgggccacaacaactccaagtcgaccgaggactcgctgaaccgccacggcttcttcctgggcgccgccgcacagtccaacgccgatgaaagcgccgacgtggtgccgccgctggccgacctgcgcaccgccgagcacctgggtgcccgcgtggccgaagtggcgcagcaactggtcgcgggccggcgcgcgctggcggaactgaaagaagctgcctgatccggtcgcacccagacacatcggccccacatggggccgattttcttttccgggcagtcgcgagccctgggcgctcagtacaagacttccagctcgtcgaacaactcgctgtccttctgcgccgccgagcgcgcgcggcgccggatttcctgcagcaggcagtcggtgaagcactgcgccgcggggctgcgcaccgcgttatggcgcgtgatgatgccgagccggctggtctcgtcctggtgatcccgctcggtctctatatccgccgccacctggaagaaaccgccgaagcgccggccgccggcgcgccgggccatgaacgcgcaggcctgactgaaatcttccgtgggcacggccgcgtggtggtggccggcgtgctggtgacgatcggcggcacctccgccacctatatcgtgctgcactacatgaccagctacgcggtgacggtactgaagatcccgctcgggctcagcatggccgccggctgcgtcgccgcactggtgcaggtggccctgtctgcgtatgccggcaggctgtccgaccgcatcggccgcaagcccgccatcctgtggtcgcgcgtggcgatgctggtgctggtctaccccgccttcctgctgctcaacgcgcggccgtcgctcggcacgctgctggccgtggtcgcgatgctggccctgccgctggtgctgaacgtagtgccgtccgtggtgctgatcaccgagctgttcccgcgccgcattcgcgcgagcgggctgtcggtggtctattgcatcggcgtgctggtgttcggcggcttcgcgcagctgatcgccacctggctgatcgaactgaccggcaatgccagcgcccctgcgctatatgtgatcggctgcggcctgatttcgctggtcgggctggcgatggcgccggagacggcgggcaagcggctggactgactgtggcagactacccaccggacaagatccggcgcgcgcgctccagcaccgggcggtccaccatcttgccgtccaccgccaccgcggcgccatcggcagcggcagccgcggccatgacgcgcccggcccagtgccgttcatcggccgacggcgccaggccgtcgtgcacgccgcagacctggcccgggtggatcagcagcttggcgccaaagccgaaggcccgggcgcggcgcgtttccgcggcaagtgcggcgtcattgccgattgcggtgcaaacgccatccacgggcgcgggcaaacccgccgcgcgggaatgaagcaccagccggctgcgaaagtagtgcaacgcctcaccgtcgtcctgcacgtcgagatcgaacatcaggtcgatgctgccgaacagcagccggaccacgccgccggcacgggccagctcgcgtaagccggcgaagccggcggcgttctcgaccagcgggaaacagcgcacaccgggcaatgccgcagcaagcgcatcgacgccggccgaatcggccttcggcagcacgatttccgagacaccctgtgcgcggcaccaggcgagatcgtcttcgtagtacgcggtatcggcgccgttgatgcgcaccagcatggcgacgccggctgccgctgcctgctggcccagcgccgcccacggggcgccaagcccgtcgcgggcctgccccttgtcggcgggcgcgaccgcatcctcgaaatcgacaatgacggcatcggcgccggagccgatcgccttggcgatgcgctccgggcgcgaggccgggacaaacaggtagctgcgaggattggcgatcggcatggctgctcctttcagactgcgccggccgagcgcaacgcggcaatctgcgccgcggtctggcccagttcggccaggatggcatcggtgctcgcgccgagcgacggaatcgggtccatgcgtgcctcggtcatgcccggcggcagcaacgccggcaccggacccaccggcgtgtcgacctggcgccagcgctggcgcgccgccagctgggggtggtcccaaacgtcagcgatggtattgacccgcgcattggcaatcctggcggcctccagccggtcggccacttcggtggcggtcaggcccgagaagctgtcgacgatgcgcgcgcgcagcgcggcgcggttctggttgcgcaggctgttgctggcaaagtcgggatgcgtggcgagatcgggttcgcccagcaccgcctcgcagaacacgacccactcgcgctcgttctgcagtccaagcatcacggtcttgccatcgccggtcggaaacgggccatagggatagatggtggcatgtgccgcgcccgcgcgcggcggcggctcggcgccatcgaaggcgtagtagagcgggaagcccatccactccaccatcgattccagcatcgagatatcgatgcgcttgccgcgcccggtcttgccgcgttccagcagcgcggccaggatattggtataggcgtacatgccggccgcaatatcggctactgaggcacctgccttgacgccgtcgtccggcgtgccggtcacggagacaaagccggactcgctctggaccagcaggtcgtaggccttcttgtcgcggtacgggccgtcgctgccatagcccgagatatcgcacacgatcaggcgcgggtacttttcgctcaggctgtcgaagtccaggcccaggcgcgcggccgcgccgggcgcgaggttctgcaccagcacgtccgcgcgttcgagcagtccggccagcacgggggcggccgcggcgtgcttgacgtcgagcgtgaggctctccttggagcggttggtccagacgaagtgcgaagacaagccgcgcacgcgcgtgtcgtaggcgcgggcaaagtcgccgctgccaggccgctcgatcttgatgatgcgcgcgcccaggtccgccagctggcgggtgcagaacggggccgcgatcgcctgctccagggaaacgacggtgatgccttcgaggggatggggcatggtggtatccggttttgcgcaatgtcctgacggcaatctaccggagcgggccgcacctgggaaataccgattgccgaggggatcataagtaaaatgaatactttggaattctcccggagcctgccatggacctgcgcgccatgcgctatttcatcgccatcgtcgaccagggcagcctgacgcgggcagccgaagtggtctgcgtggcgcagcccgcactcagccagcagctggcggcgctggaaaaagagctgggcgtgccgctggtccatcgcggcgccaagggcgtcaaacccaccgaagccggccgcacactctatcgccacgcccgcaatatcctgcggcaggtggagatcgccggcgccgaggcccgggtggccggcacggatgttaccggcatggttgccatcggcctgcccaccacggcggcagcggcattcggcatgccgctgatccgcgcggtgcgcgcccgctatccgcaaatccggctgcagctgttcgagagcatgagcggttatatctcggagctgctggaccacaaccggctggacttcgccatcctgttccgcgatgtgccgtcgcgcgcggtggaactggagcggctggcaagcgaatcgctatacctagtcgggacgcttcccgtgacgcgcgggcgcgcaaaggcgcaagcgaagcctcgggcgctggccggtgcggaaggcgctacggtcgcgatcaaggcactgggcgagctgccactcgtgctgccaagcggctcgcagggcctgcgtgaagtggtcgaacttgccttcgcgcaggccggcgtgtcgctgaacgtggtggccgacctggattcgctgcccttcctgctggcgaccgcgcgcgagggcctggcctgcaccatcctgcccgcgtcgtcgctgtccgacgcggacagcgaagtgccgcggcacctgatcgtgccggaactgcgccgcacgctgtcgctgtgctggccacgcgcgctgccgcgcaccagcgcggccgaggccgtggcggagatgctgcgtgagctggtggccgagcgcattgcggcgggcgggtcgctcaagccgctcatttcgccgcctgcggccgatcaataaaacttatgcccgtagtcggcgattgaatttcacgccggcgcggcagtcggctagagttgccaccagcctgggccggcattcacggccccgcaattccaggagacaccatgcaacgcacccgccgcgccctggcagccgccgctgccctggccgcatgcctgccgctgttcagcgccagagccctcgccgccgccccctatccgtccaagcccatccagatgatcgtgccgcaggcaccgggcggcaccaacgacatcgtcgcgcgactggtcgccgcgaccctgtcgcaacggctcggccagcaggtggtggtggaaaaccgcccgggcgccggcggcaatatcggcacccaggcagcggcccgcgccacgccggacggctacacgctgctgatgaccatcagcagcacgcaggccatcaacccgtcgctgtaccgcagcattccgttcgacccggtcaaggatttcgagccgatcgccccggtggcaagcgtgccgaacgtgctggtggccaatcccgccttccccgccaagtcgctgcccgaattgatcgcgatggccaaggccaggccggactactaccgctatgcctccgccggcaatggcacgctgaaccacctgctgggcgagatgctcaacagcatggccggcatcaagctcgaacatgtgccctacaagggcgtcgcgccggcgctgaacgatgtgctgggcaaccaggtgccgctggccttcgccagcctgccgtcggtgctggcccatatcaaggcgggcaaggtgcgcgcgctcggcgtcagctccgccaagcgctcgccgttcgcgccggacattcccgcgatcaacgaaaccgtgcccgggtatagcggcgacctctgggtcggcctgttcgcggtcaagaatacgccgaaggacgtgacccaaaagctcggccaggccatgcaggagatcctggcggacaagaccctgcgcgacaagctggcggcacagggcgccgaagtgatgacgggcacgccgcagcagttcagcaagatgctggcgtccgacatggacaagtgggcccgcatcgtgaaggcatcgggcgcgcaggtggactgagcgcggcgttcaagggcgcgccaaccgcgcccggaacaccacgagcaagcctagcattgccgctgccagcccaaattgctgcagcccgccaatccccaccttcccgcgctccccttcaatccactcgaaccgcggcgcattccgatactcgtccgtcgacacgccacgatagcccatgatgcgcgggacgaagtacgcgcgccactgcgcttcgaagcggtctacccgtgccatgaagctggcgtaccgcggcgcgtcactgcctgccagccggtcggcagcaagcagcagcgacagtggcggcgacaaccagccccatcgttccgcctgctcgaaacgcagcgcgcgcgcctggtcgaacgcggacacgaccggccggatatgcgctgcctggtcgaggtagcgcggcatgaagctgaccggccatgcgtgctgtcgtgccgtggccggggcccactgcggattagcctgataccactcgtccaccagggccgacatcctggcttccgcgctctgctgcgccgcgcggatctggacgattgccgccagccgtgacggcatcggcatcgtgcgatccgccagcgccgcgaccatcgcaggcgtgccgaaggtggcgatgacccacaggccaagcccggccagcaccgccgtggcaccggaaccgggcagcaggttgagcgcaccgctggccgcactccagaacgcgatgaacgccgtcacgcagaacagccatgcgagatacgccgacagcgttgctgcggggtccagcacgaatgccagcgtggaagcgagcactgcaatcagccagacggcgcccgcccgaaccgcgatggcggcgaacagcacacgcccgccggccgcaccctgcgccatcaacatccgccacgtgccatgttcgcgctcgccctggaccatgcctgcgcacaggcaaaccagcatgagcggcgccagcagcgcgatcgccgtcgccaggtcgaaggtgccatagcgctgcaacagcgggttggccagccgctcctcgttgcgcgcgtcggtgtggcggctctcgacagtgacgcgaaccgacggcggcagcaggtccagcacgctgctcgccagcgccaacccgccacctggcggcagctgcgccaccggggcttccgacctggcgaaccggaatgccgccatggcggcctgctccggcgatgccggcgatgccttggcctgggcaaggcgcaacgccgcctgcccgtttgcttccagctgctgcagcttctcatgccatgcgcgcgcactgagacccgatgccagcgcgcacgcgcacagggcggcagcaaacagcagcagcgcccaacgggcactgcccgccgcgcggaagcggcggcattgcgcggcaagcgcctgcctggtctgtcttatggggttcatggctgtatcctgcgaagagagaagaacaggccggccacggccagcccgcaccaccagaacatgatcgcgatctccggcaacgctgcccgcagcgcgaacagcgccggcggcatggtgtaggcaaagggccggattgcgcgccaaagcgcagcgcctgcgtacctggcatcgaacgaagtcatgccgcgcgtgtggctggcatcccattcatcgatggccgtgttgacgctgcgccgatagcgctccgcggcggcctcgtagtcgcgctggtgcgagagatccgttcccgccatcttcatggcgaagttgcggatcgccagcgtggggctcagcagcgcggcggcgcgcatcacgttctcctgcgccgcatagcgctgccacagcgcatcgaaatgcagcgcatggacccggtcggcgtaggcgtcgcgctccagccgccgcagcggcgccgcgcccacgggcaggtcctcgaggcgcgtgacgccatagcgcgacagcagcgccgcgtcatggcgttcggtgcgggccgccaggttgccgtcgcccggcaatccctccgtgaagtcgcgctggatcgccgcccagaacgcttgcgccgacggcagcggcacggcatgccgcgcaaccgccgcgccaatgcccgggatcacgaagacaaaggccagccacaggcccaccagcacgaacaacgcgctcctgccgtcggccagccaggccgacaccgccaggcccagtcccaccagaatcgcggtgtatagcagataggcggcacccaggcccgctgcccgccaccagaccgcaccatccagcgtgccgccggcgctggccgcgatgaccggggccagcgcgacggccagcgcaaacacggcaaagcccgcgcccagcgccaggaatttgccggccacgagcctggccggcgccacgccggcgccgtgcatcatgcgcagtgtgccgcgctgccgctcgccgctgacggcatcgaaagtgactgcgatcaccagcagcggcaacagcaccgcgaacacgaagccggcgctcaggtcgccgaagcgggtggatggcagcgcatcctgcgcgggctcgaagcgcgccacattgcgccggtgcggctccagccacagcgcctggccaaagtagtcgcccagccccggctcgatcaccgtcagcgcggaggcgggccggaacacgtacaagccgaagtgcgcgccgcgatgcggatgcttgtcaccctggtcgtcccactgctgccgcgtggcggcggtaacctgcgccacctcgctggcgacggcggcatgccgctgcagcgaggccaggatggcgacggccaataccgcggcgccgatcgcaagcagggctgcgaagcgcccctccctggccatcgccctgagttccttcacaaccacggtcctgatcatggcgcaacaccctgcgcgcgcgcatgggccaggtaggttgaggccagtgcctcgtggccgacggtggccgcgtcaaactcggccaccagcacgccggcacgcaggatgccgatgcggtcggcgagctgcctggcgttgaacaggtcatgcgtggccatcagcaccgccgtgcccgcgtccgccgcttgccggacacggcttgccatgtcatcggccgcggccgggtccagccctgaggtcggctcgtcaagcagcagcaatgacgcggatttggcctgggcgatggccaggcccaccttctggcgcatgcccttcgagtatttcgctacgcgccggccgtgcgcgtcgcgggccagccccgcgccgtccagcagcgccgtggcctcggcacgcgacaggctgatgccggcaatcgcgcagaagtaatccaggttttccgcgccggacaagtagggatacagcgcgacgttctcgggcaggtaggcgacgcgccgcctgaccgcagccggatcggcaacgggcgacagtccgtcgaccagcaccgtgccaccggccggcgggacaaaccccagcgtcacatcgatggtggtggtcttgcccgcgccgttgccgcccagcaaggcgtagatgcagcccttcggcacggtaatattcaggccgtccaccacgcgacgcccgtcgcgatggacaaccaggtcacgaatttcaagcatgtcgtgtctccgtcgaatacgtcagaagaaatagcgtgccgccatgccggcctgccatttcggctgcggcgctaccagcagccccgctgcggacccatacgcggcctcggtcgagaaccggtgcggctgcagcaccgcgaacagcgacaactggtattgcttccagtcgagcaccgcacgcaagtcgaagcgcgtgtaggctggcatgaagcgcaactgggtctgcggcgcccccatgtaatagggaataccggtagtcaggtaagcatcggcattgaccgtcagttgcgcgccctgcagccgctggcggtactcggcgcccagcttgagctggtgccggggaaccgaaagcctggcccccgtgtttggcagcgggttgtttgcttcggcctggatgatctgcccgtagctggcgtagaccgacaccgggcggatgggccgccagcgggcctcgagctcatatcccttgcgcgtcgtgtcgccgaccgacttgaacgatccgtccggctgccccacgatctcgtcctcattcagcgtgtagtaggctgctgcggtcacggtcaggttgttggccggcgtcgcggtaaagcccacgtcgtaggatttcaccttcgacggcgatacgtcatagaccgtgccgccgggagcgcccagcgggcccgtggccccgctgctgctgatctgctccgcggccggcgaacggaagccctgcgcgacgttggcgaacaggtcgagccggggcagcaccgaccagaccgcgccgagcttcggcgtggtgacgcccgagaagtagtcggtgctcgctgccggcagcttgcggttgacgatgtcgtagtcgaaccagtcgcgccgcaggccggcggtcagcttgaccgcttcgacgggcctgaactgcccctgcacgaacagcccgtaggtgagcaggtcgagctgctgcgcgttgatatagttcgcagtgggcacgccacgcacccagatctggcgctgcgcgtcgccgcggtcgcggcgcacttccgcgccgaccatgagcgcggcccggtctccgaaggtgaagttgttggccagccggccgccgaagatattccggtcatccgaacccacggtgtgctgcacgctgctggtggcaatgccacgctcgcgctcgaaggcttccccgtacaacgtcgcataccagccgtcctcgccatgcgccggggcgcgattcagcgcgaacatcgaacgcttgccgctgccgaagcccggcagcccgtattgcgtggagcgcgggtccaccttgccggattgcaggtcgctcagcagcaggtagccggcggctgtcgattcggagcgatagtggttgagccgcaggctgtagacgccgtcgccgatcctggtcgacagcttccagaaaaagttgtcgcggtcggtgctgccgtcgtaccggtagctatgggtgcggtagatatcggccacgaacagcgacttgatcggctcaggcccgggccggaacgcatggctgcctgacaggaccagtgttgcgcgcttgccgttgtaccggtcgaagccgatgccgatgctggagggcacgtcgcccgactgcgtgctgatcggcacggcacccgcccggttctggtcgccatacaacgcggacaccggccccttgatgacgtcaatctggccgatcatgtccggggtcagccattccaggaatgcaggcccatgcccggcgccggcctggctggacggcatgttctgcggcaccccgtccacatagactgcggtgtcggcgccgtgcgtgccctgggtggcgaagccgcgcatgcggaagccgttgcccgtgtcgccctggtcgatgttgttggccaccaccccaggtacacggcggaacatgttggagatgtcccggccgatattgatggtgcccaactcgtcggcggtgacgaccgagaccgcggtcggcaggccggtgctgtccgtggtcacgagcttgcgtttgccttgcaggctggtgtcctgcgtcgccaccacgctgacttccggcagcaccgtatgctggccttcggcaaatgcggcctgactgaagacgcccgacgagagcgagagcagtgtccaggccagggggcgcgcggcacccgtgttttcgttcttgttcatgaggcctcgcggcagcccggcggtatccgctacgggcaccgggcttgccgtacaaaattcagacgtgagcatgccgcccgcctggcatgacgcagcggacgcgcaatcagatatacgggaaagggatgcggccgggggttagccggcggcgcggggcagcgccggtggcgcgcgcaaggcgggcggagagaggaagcgggtacgccatgtcggcgcggcgacatcgacctgccgtacccgtgacaacaggcgcaggatgacgcagagcatttgcaccgcgatggcggcgctgatgaagagatgcaaccggggcgagcaccacaggcaatcgcattccgtcgtgccatcggcaggcacgcggtccgtgtcggacgtgtccggcgtggcggccgtatcggggattgcgcctgcgcttgtgttcgccacgacagcctccagccgcgttcccggtaccgcatgcacgtgcgtcaccgcggcccacgcctgcactagcaagagcaggagcacggcccagatgagacgaacgaagttcgcatgcttacgcattgatggaggcgctggctgtgtcgaccggcgccatattaacgcaactcaattgcaattgtaagtcgatgccgcgacaagcctgtcctgcaagccgctaaagactgcaccgttcccgccgttaagcaagagttggccagcgaagacattggcaagacaggcagccggcacgccggcgcctgcacttctggggtggaaacgggggagagacatgcaaaacctggggattcgcatacgcctgggcgcggcgtttggcgccatgtggtcgctgatggcgatcgggatcgcggtggccttgccgcggatgcaggaggcggccgatgcgcggcgcctgctgatcgcgttgggcgtgggtgggctatgcctggcggtgggcgcggtctgggcgctggcgcgcagcatcgaggcgccgttgtcagaagccgtctacatagccgagaccgtggcggcgggcgacctcagccaggagttcgacaccgagcgcggcggcgagtttgggcggctgctgggcggcctgggagagatggaagacatgctcaccgacctggtgacacgcatccgcgcttccaccgattcgatcaccgccgcttcgcaccagattgccgcgggcaataccgacctgtcgcagcgcacggaagagcaggcggcggcgctggaagagaccgcgtcaagcatgggcgagctgacctcgatggtgcagcagaacaccgaacgcgcgcgcgccgccaacgggctggcggcaaccgcatcgggaatcgccgcgcgcggtggcgaagtggtgggcaacgtggtgcagaccatgtcggcgatcagcgccagctcgcgcaaggtcacggacatcatcgaagtgatcgaaggcattgccttccagaccaatatcctggcgctgaacgcggcggtggaagccgcgcgcgcgggtgagcaggggcgcggctttgccgtggtggccggcgaggtgcgaacgctggcgcaacgcagtgcgtcggcggcgcgggagatcaagcaactgatcgacgattcggtgcagcaggtggacagcggctcggcactggtgggccaggccggcgagaccatgcaggagatcgttcaggcagtggccagcgtgaccgggctgctgggcgagatcactgcggcctctgaacagcaaagtgccgggattgcgcaggtcaacgaggcggtggcgcagatggacaccgtgacgcagcagaatgcggcgctggtggagcaggcggccagtgcctcgcacgaactggcgggccaggccactgagctgcagcgcgtggtgggcgagttcaggctggatgcggaaccggcgtcagcacaggcgccggggcatggcgcattcaggcaggttgctgcgttcggctgatgtgggcagcgcggattgctgactgattgcgcgccccctctcccgcaagcgggagaggggagcgaaccagcgggaggcaggacccttcagcaattcaagccgtcacgcaagccggcagcactgcctgcaccgccgccgcaaagcgctcgacaatcctgtcgatatcctgcggcgtgcaaataaacggcggtgcgaacaacacgtggtcgccatgcacgccatcgaccgtgccacccatcggatagaccagcaggccgttctgcacggcggcggctttcaggcgcgcatgcgtcttcagcgccggatcgagcgtggccttgctgtcgcggtcggccacgaactccacaccgacgaacaagccgcgtccacggatatcgcccaggttgggatggtcacccagcacctcgcgtaaccgtgcgcgcagttgctcgccgcgcgccagcacgttggccagcaagttgtcttcggcaatggtccgctgcaccgccagcgccgcggcgcaggccgtggcatggccgatataggtatggccatgctggaagaagccgctgccgccgacgatggcgtcgtagatcctgcgcgtcgacagcatcgcgccgatcggctggtagcccgcacccaggcccttggcaatggtgacgatatcgggcaccacgccatcctcttcgcacgcgaacaggaagccggtacggcccatgcctgacatcacttcatccaggatcagcagcacgccgtacttgtcgcacacggcgcggatgcgcttcaggtagtcgcccaccggcggcaccgcgccggcggtggcgcccaccacggtttcggcaacgaaggcggccaccgtgtcggggccaagttccaggatcttggcttccagctcgtcggccaggcgctgtgcgtattgcgcgtcggtctcgccggcctgctggtcgcggtaggcatagcacggcgacacgtggtgcgccggcaccagcagcggcaggaagggctcgcgccgccaggcgttgccgccgatggccagcgcgcccagggtgttgccatggtagctctggcggcgcgcgatgaagtggcggcggctgggctgccctgcttcgacgaaatactggcgcgccagcttcagcgccgactccaccgcttcggagccgccggagacaaagtagacatggtcgagatcgcccggcgcggcctgcgccagcgtctcggccagcgtttccgatacctcggtggtgaagaacgacgtatgcgcgtaggcgatggtgtcgagctgcgacttgatcgcctcgatcacgcgcggatggccgtgccccaggcacgacacggcggcaccgccggaggcgtcgagatagcgccggccttcgctgtcgatcagttcgatgccctgcccggcaacggcaacgggcagcttctggcgcggattgcgatggaatacgtgggtcatgatggtgtggtggtggtgccgcgcgtcagcggcgcagagcggaatcggtgtcggcggggtggcgctccagcacgcggccggaaaacgcgggcagtgcgctgccttcgctgtccgtctgtgtggactgttcccagaccctggcgccgttgacccagacgccgtggatgccggtgctcagttgcagcgggtcttcaaaggtggcacggtcctgcacccggtccgcatcgaacagcaccaggtcggcaaacgcgcccggcacgatccggccgcggtccgccagcccgtattgctgcgcggccaggccggacatcttgtggattgcggtttccagcgtcatcagctggtcttcgcgcaccatgcgcgccaggatgcgcgggaaggtgccccactggcgcggatgcgggcgcggatcgaacggcaggccgtccgagccgaagatggtcagcgggaactgcgcaatgcgctcgacatcgcgctcatccatgatgaagtagatcgccgccgcggggcgcagctttgccaagagcgcgtcctcgtccaggccaagctcctgcatcagctcgtggaagtcgcggccgcccgcaggcgggtagccggtggaccaggtgatcatggtgcgcgtggactggcgcacgcggtccagccgcagcatggtcgaggtcgcgggatagggatggcagtccaggcacagcggctgcaagcgcgcggcgtcggccagcaggccgagggtttcgaccgagcggccatgattgcgcttgcccgcgaccttgtggtgggaaaacaccacctggcagtcaagcgcgcggccaatgcgcagcgcttcttcgatcgacggcacgatgtcgtcggtctcgtcgcgcaggtgggtggaatagaggccgccgtgggtgcggaccggctcgcacacggcgatgatctcggtttcggtggcggctgccgcgggcggatagaacgtgccggtcgagacaccgaaggcgcccgcctccattgccagcctgacctcgtcgcgcatcgcagcgatttcttctgcattggcggcccggttcagctccggcatcgcgcgcacgcgcaacgtcgaatgcccgagcagcggcaccacgttgacgttggccggcgtcgcgcgcaatgcgtcgagccactgcgcgaaggtatcgaagcggaacagcgcgggcggccccagcaggtccagcggctgcggcggcgcgctgctgaccagcggtgccacgctgatgccgcagttgccggtgaccacggtggtgatgccctgcgacaccttgggcgtcatgtcccgatgcaccagcaggtagccgtcgtcgtgcgtgtgggcatcgataaagcccggtgccagcacgcggccggctgcgtccacggtatggtccgcggtcatgtcagcgcagtcgcctacggcgacgatgcggtcgcccgcgactgccacatcggccgcgcggcgggctgcgcccgtgccgtccacgaccgtggcgttgcggaagatcaggtcggcgcgccggtgcgcggctggttgcgatgccatcgtcaatccttgtctcgttggcgggccttactgcggcgtgatgccggcctgcctgaccacggccgcccatttgtcggtttcacgcgcggcatagccggccagcgcctgcggcgtgccgccgaccgtctcggcgcccagtgcggcgaacttgtccttgatggccggatccgccagcgcgcggttgaaggcgccgttgagcttgcccaccaccccggcgggcgtgccttgcggcgcgaccaggccgccccaggccaccccttcgaaacccggcacgccagactccgcgatggtgggcagcgccggcagcagcggcgagcgcgccaggctggtcaccgtcagcggcttgagcttgccggccttgatcagcggcaggatggtcggcatgttgtcgatcagcacattgacctggccgcccatcacatcggtggcggcctgcgggctgcccttgtagccgacgtgcgtccaggccagccccgccttgtccgcgagcagctggccagtcaggtggccggacgtgccctggcccggcgaggcataggtgaccttgtccgggttggccttgacgtaggccaccagctcggcaaaggtcttcaccggcatctccggcctgaccgcgatcacattcggcaccttgaacagcagcaccaccggcacgaaggcatcgggccggtacggcagcttgcggaaggtgctcttgttgatcgacagcgtcacgttgttggcatagccgagcgtgtagccgtcaggcgcggcgcgttccagttcggagatgccgatcacgcccgaggcgccgggcttgttgtcgatcacgaacgactggcccagcgacttgccgacttcggcgcccaatgcgcgcatcagcacgtcgggactgccgccggcggctgacggcaccaccaggcggatcgggcgcgacggatagctgtccgccattgccgggccagccaggcccacggcgcccagccacaacagggtggccatgaaccgtcgcttttgctgctgcctttgatcttgcatctcgatatcccgttcagtacctgggttggacccggctacgcgtttgcagtataggggcatgacccgaaccaatgcaacatttgtttcttaaatgctcatcatgaaacaataacgatgcgacgccggcacgaatgcctttgccgcaacggcccgaactccatgaaacagtcgttacagccatcggggcgtcgcgctgcggcacagcccctgcgcctcaaggaagcgcgccgccgccagtgcctggctctcgagcccgggcgcggccacgatctggatgcctgcgggcaagccctcgcccgcgcacggcgcggctacaacgggcaggcccgccagcgacaacgggcgcgtcaggtgcccggcatcggcacgtgggcaatagatgcggccggtgccgttgacggtgtcggcaccgatcggcgtggccgcatagggcgtcgaaggggccagcagcaggtcgacgtcatcgaacagcgccagcagccgctgccgccacgctgactggtactggcgcgcgatgtcataccagccgcgcggcatcgccagcccggccaggatgcgctggcgcacgaaggcgctgtagccgccatggcgctcggagaagcccatggcctggtggttgcgcccgacttcgtaggcggagatcaccgaggcggcatcgcgcgaactgtcggcgtcgggcaggtcaatggtgcgcaccgcgccaaaggccgaggccacgcgcagcaccgccgcctgcaccgcgggctcggcaaaatcggaaaagccgcggccgagcacgccgacgcgcagcgtcgcggcaccacggccttgcggatcagcaggcgcgtccacgccgagcattgccgcataggccagcgcgaggtcacaggcgctgccggccatcgggccgaccgtatccaggctctgcgcgtacggcacgcatccggccagggacaaccgccccgtggtcgggcgcagcccccagatgccgcagaacgcggccggggcgcggatcgacccattggtatccgaacccagcccgaacggcaccaccccggcagccaccagcgccgcggtgccggccgacgagccgccggtgatgcgcgacggatcgagcggattgcgcaccggaccgccgatcacgttctcgccggtagcgccgcacgcgtattcgtccatcgccgccagcgcaacgggcaccgcgcccgcggcgaccagcgcctcgaccgtatcggcatggcgcagcgccggcggctcctgcgcgcgtggcgcggcgccggccagcgtggcgtggccgcgcacgtccagcaggctcttcaccacgaacggcacgcccgccagcggcggcagcagccggccctgcgcgcgcagccggtccagcgcggcggcctgcgccagtgcgctgtccgccagcagcgccgagcaggcattgagcggcgcggcggcttcggcgcgctgcagggcgtcttgcaccaggtcgagggcaagccgctcgccgctgcgtacttgcgcggccatggcggcggcggtcggcgtgtcagcaaccatgctgcccctccgcttgcgccagcgcctggcgcaggcccgccaccatggccgccatgccggccagcagcgcggcggcctgctcgcaatcctggggtgccaccggcacctgcaggcccgcggcggcttgtgccaccaggccggcgggatcgtcatcgcgtgcttgtgccatggttgcttgcgccatccctcagctccgcgattgcatcagctggcgtggaatcgccaggatcagcaccgccgcggccagcatcagcccggccagcgccagcacgcccagcgagatgctgccggtgctctgcttgatgccgcccatcagcaccgggccgatcaggccggccaggctggccgcgctgttgatcatggcaatgccgccagccgcggcggtgccggccagcacgcggcccggcaggccccagaacatcgacagcgtggccatcaggccggaaatgccgatagtcaggaacaccatcgccatcaccgtgttgtgcgggaacagcgtgctcgcccacatgccgacggcggccaccagcagcggcagcgcggagtgcaggcggcgctcgccggtgcgctcggcgtgcgcggcgttgacgttcatcgccacgcacgcgaccgcatacgggatcgccgtcagcatggcgatctcaagcggcgacgacatcccggtcgactggatgatggtgggcagccagaacaccaggccgtagttgccgatattgaacagcaggcagatcgccatcagcatccacaggaccggcgacttgagcgcggcgatgaagcgggtgttcttcttcgcgttctcggtggtcagcgtgtgggtgatggcgcccgcctcggccggcgtgagccatggcgcggcctccggcgactcgggcagcatgcgcaacagcagcaggcccagcacgatggccgggagcgcctcgatcaggaacatccactgccagccttgcagcccgtgcaggtcatgcgtggctgacatcagcgcgccggagatcgggccgcccagcaccatgcccagcggcatcgccaggaacaggatcgacatgatgcgcgactgccggtcggccgggtaccacttgttcaggtacatcaccgcggccgggaagaagccggcctcggtcacgcccagcaggaagcgcgccgcgtagaactccatcggcgtggtcacgaacatggtcgcggcggataccagcccccacaggatcatgatggccgccatgctgcggcgcatgccgaggcggtagatcagcaggctgctgggcacctggcacagcatgtagccccagaagaagatgcccgcgcccaggccatagaccacgtcgctcagccccagcgcctgctgcatctgcagcttggcgaagcccacgttgacccggtccaggtagctgaagaaatagcacagcacgataaacggcacgatgcggcgcgtgaccttggcgaacgcggcggcggcggcgtccggcaacaccgcggcgtggcccggggactgcgggatggctggcttggccagggacatgatggatctcctccttgtacgggcgcgcggtatccggcgccatggagatgccatcatagcggagtatgaaacaaacgttccactaacgtttacactgaaacaaacggttttattccttcacgtgacgcggaagacccgccaaatgaaaaagggcggcaatgcatgccgccctgtggcgctgtcaggctggtgcgcgcggcttgtccgccgcacgcttgcgcggggccttgccgccgcctcttgccggcggcgctgccggcccggtgacatcctgcgaggcgccgaccatggtcagggcgttgccgtgctcgtccagcgtgacctcgccttcctcatggatgtcgcgatggctgccgtcgggcagctggatgcggtagttgacactgtacggcgccttgtcgacgatggccgcgcggatggccgcctgcacgcgcgcgcggtcctcctcgacgatcgacgccaggtagcgctccatggtcaccttgaacgcctgcggggcccagccgaagatgcggtaggcctcgtcggtccaggcgcagtcgtcggtctggatattccagtaccagccgcccaggtgggcaatctcctgcgccttggccagcagcgcctcgttctggcgcagcgcagcctcggcgcggcgccgctcggtgatgtccaggctgacgccgatcatcttgaccgggcgctggtcgaagtcgcgcaccagcgtggcccgcgacgagatccagcgcgtggtgtccccgtgcacgacgcggaactcccactcgtgcatctcctgcgcgcccagcgtgcgcgccagcacctcgcgcaggcgcgcgacatcggccggatgcacgcaggcccagaagtcgtccatgttgcggatgtggcggccgaacagcgtgacgtcgttggacgagtaggtcaggccatcggtcagcacgttccattcccaggtgacgatgcccgagacctcctgcgcgaacttcatgcgcgcctcgctctccatgatctccgccaggtgcttctggcgcagttccttgatgtgtgggtcagaggcggtgctggcctccaggtcggcgatggcctgctcgccgtagcgcagccacagccagttgacgcccaggaagcgcgccagcgcgagcagccgctcgtattcgatctcgccgccgcgggtccacttgtgcaccgccgacggcgataccgacagcgcctctgccacctgcttgagcatgatccttttgccttccagcacccccttcaggcgcgtggcaaaagtgtcttccgtcatgggcatcccctccgctttttttcaaccgatggtgaattgagtaactcgaaccttacaccatcaccgcaaatcgcgcgaattgatagccatggaccatcaagcgagcaaatttcatcggttttttgaattgcaatacacctgcgctcctcactagacttcacttcacatcaccaacagtaatttaattaactgttagtgaatcgataaggcaacgagaccaacaaggagacaacccatgcaagagaccaccgcccccgcctgcggcaccaccccgccgctggcctatacgctgccggcccactactacacctcgcaggaagtcttcgagcaggagaagaagaccatcttcgcgcgcagctgggtgtgtgtgatgcacaagagccaggtggccgagaacaaccagtacgccacagtgaaagtggccggcgagaacgtgttcgtagtgcgcggccgcgacggcgtgttgcgcgcgttctacaacgtctgcccgcaccgcgcccatgagctgtttgcggatggcgcgggcaaggccaagaacgtgatcacttgcccgtatcacgcctggtcgttcggcctggacggcaagctgatccacgtgcgcaacgccgagaacgtgccgggcttctgcaaggacaacgccggcctgacgccggtgcgcgtggaagaattctgcggcctggtcttcgtcaacctggacatggacgcgaaaccgctggccgagctggcaggcggcctcaacgacgagatccgcgcgcgctgcccggatgtcgacaagctggtgcccgcgcacaagctcacctacgagatgaaggccaactggaaggtggtggtcgacaactacctggaatgcctgcactgccagaccgcgcacccggcgctggtcgagtcgatcaggatggagacctacaagcacgaagtgcgcggcctctacaccagccaggtcggccagacgcgctcgggcagcgacgccttcacctatgacagcgacgcccccaacaccgacttcgccgcctactggctgtggcccaacgtgacgctgaacgtgctgccgggcgatggcaactacggcgtgttctacatgttcccggtggatgccgacaccaccatccagcacttcgagttctacttccgcgacagcacgcccacggccgagcaggagcaactgatcgagtactacaagaacgtgctcaagcccgaagacctgagcatcgtcgaatcggtgcagcgcggcctgaagtcgcgcggctaccgcaacgggcagggcccgctactggtcaccgacgacaagacctccgccatcggcgagcacggcgtgcagcacttccagcagatggtgctcgacgccctggccgcctgaaacgaaccaccgaaccggaaccgcagcaatgatcctgacccagctctatatcgacggccagtggcagtcgcccatcgaccaaggcacgcgcgccatcctgagcccggccgacgagtccgtgatcgcccaggcagccgaagccacccgcgccgacgcgcgcctggccatcgccgctgcgcgcaaggccttcgacggcccgtggcgccagacgacgatccgtgaccgcgccaggctgctgaacaagatcgccgaactgattgaccgcgatgccgagaagctcgcccgactggagtcgctcaacaccggcaagacgctgaccgagagccgcaccgacatgggcgatatcgccgccaccttccgctactttgcggggctggtcgcatccgagtcgggcgccgtcaacgaagccccgcaccatgtgatcagccgcaccctgcgcgagccggttggcgtgtgcggcctgatcacgccgtggaactacccgctgctgcaggccgcgtggaagatcgcgcccgcgctgggcgccggcaataccgtggtgatcaaacccagcaacctgacgccgctgaccacgcaccacttcacgcaactggtggccgagctggacctgccgccgggcgtgttcaacctggtgaccggcggcgccgaagtcggtgccgaactggccgagagcctggacgtggacctggtgtccttcaccggcggcgcctatgccggcgaaagcatcatgaaggccgccaccggcaacttcaagcgcatcggcctggagctgggcggcaagaacccgaacatcgtgtttgccgatgccgacctggacgcagcggtcgactacgcgctcaatgccgcgttcttccacgccgggcaggtctgctccgccggctcgcgcctgatgatcgaggacggcatctatgatgcattcatcagccggctggccgagcgcctgccgcgcatcgtgatcggcaacggcttccacggcgagacccagatgggcccggtgcagtcggcgcaacagcacgagaagatcctgggcatggtgcaggccggcattgccgagggtgcacggctggtccacggcggcaagcggccggctggcgacgtcttcaagacgggctactggctggaaccgacgctgctggccgacgtgacggcagacatgaaaattgcgaaggaggagattttcgggccggtgatcacggccgagcgcttccgctccgaggaagaggtgctgcgtgccgccaacgacaccccgtacggcctggccggcgcggtctggacccgcgacctggacaaggccaaccggatgtcgcgcgggctgcgcttcggcacggtgtgggtcaacgactaccacccgtacttcccggaagcgccgtggggcggctacaaggcgagcggcatcggccgcgagctggcccgcatcggcctggacgagtacaccgaactcaagcacagctatatcaacctggcccccaaggcgatgggctggttcggcgcctgagcgcagctgacttcgcaatcgcgcgcgcggcaggccctcccccgggccgccacgcacggcgtcaagcaaacaaggagattgcaccatgcaggcaatccatgagtacgactacatcatcgtcggcgcaggctcggccggctgcgtgctggccgcgcggctgaccgaggatgccgatgtctcggtgctgctgctggaagcgggcggccccgactggcgcctggactggcgcacccagatgccggccgcgctggcgtatccgctgcagggcaccacctataactgggcctacgtgaccgagcccgagccgcatatgaacaaccggcgcatgacgcagggccgcggcaaggggctgggcggttcgtcgctgatcaacggcatggtctatatccgcggcaacgcgatggactacgacggctgggccgaaaaccgttcgctggagaactggagctacgccgactgcctgccctatttccgcaaggccgagacctatgacaagggcgccaacgactaccacggcggcaacggcccgctgcacgtgaccacgcccaaggccgatatcagcccgctgttccgcgcctttatcaaggccggcgagcaggccggctatggccagaccgatgacctgaacggctacaagcaggaaggcttcggcccgatggaccgcaccaccaccgcgcgcgggcgccgctgtagcacctcgctggcctatctggaccaggccaaggaccggcccaacctgaccgtgcatacgcgcgcgctggcggaccgcatcctgttctccggccagcgcgccatcggcgtctcgtacatccagggcgaccatgtgcgcgaagcgcgtgcgcgccgggaagtgatcgtcagcaacggcgcgatcgcctcgccgcaactgctgctgcgctcgggcgtgggcaatgcggacgagctgcgcgcatttggcatcgagtcggtggcagacctgaagggcgtcggcgagaacctgcaggaccacctcgagatgtacctgcagtacgaatgcaccaagcccgtatcgctgtacccggcgctgaagtggtggaacaagcccgcgattggcgtcgaatggtacctgcgcggcaccggcaccgcggcctccaaccacttcgaggcgggcggctttatccgcagcagcgatgactttgcctggcccaacctgcagtaccacttcatcccgctggcgatgaactacgacggcagcaacccggtgcagtcgcatggcttccagtgccacgtgggctcgatgcgctcgcccagcaccggctttgtcaagctggccagccgcgacccgcgcgtgaagccgcgcctgctgttcaactacatggcgcacgacgtcgactggcgcgagttccgcgccgcggtgcgcctgacgcgcgagatcatcggccagcaggcgatggaccagttccgcggccgcgagatcaagcccggcatgatgatccagagcgatgccgagatcgacgccttcgtgcgcgagcatgccgagaccgcgctgcacccgtcctgcacctgcaagatgggcgacgcttccgacccgatggcggtggtcgacaaccagggccgcgtgcacgggctgtctggcctgcgcgtggtcgatgcctcgatcatgccgaagatcatcaccggcaacctgaacgcgcccaccatcatgatggccgagaagctggccgacgtgatccgcggccgcgcaccgctgcaacgctcgacggcgccttactacaaggccgccaccgcgcgcggcggggcgcaggcagacgcggagcggcatccgccagccactgcgcgaatgccgatgccgatgcccgcctgaccaggcggcgcggcgcgcgggcttcccgccagaacccctgaccgacgcatgtgctgccgggacttcggtccccggcgggcagcgtgcgtccggtcggcgcgccgcgcacccacaccacaaagccggctacccagaacaaacccagaccggctgcaaggaggagacttccatgctgcgcaaatactttgattcaagacgggccctgcaaggcgccctgcccctgctgctgtgccaggcgctgagcgcgcaggcgcagaccagtgccgaggccgaaaccaggctggccgtggcgccggtgccgcaggtcacggcgaccgtgccgccggccgaggccgcatcgccagcgccgctgagcgccaacctgaccctgacatcgcaatacgtatcgcgcggcttccgccagacctggggcaggcctgcggtgcagggcggcatcgactacgcccacccgagcggcttttccgcgggcacgtggatgtcgagcatcagcgacaagttcatcgagggcggcaccgtcgaatgggatctgtatgccggctacaccggcaccattggcgacttcacctatgccgggcaggtctactactacctgtacccgggcgcgaaactgcagtacgcgcagaccaagtacaactacggcgaagccgtcgcgtcgctgacgtacaagtggttcaacgtcaagtactggctgacctatacgcccgactacttcggctacaacagcgcctcgctgctcgccggcaatgacctgcacagccgcggctccggctacctggatatcaacggcaccttcgacctgggccacggcgtcacgctgctgctgcactacggccaggagcgcgtgcgcaactttgccgcctacaacttccgcgacgtgcgcgtggcgctgtccaaggccttcgagggcagctggaccgtgaccggcgcctatacccgcggctgggggcgtaccgacgtctacgacaagtacaccaccggggcgctggattcgtccggcaacccgtccgtttccaacccgctgaaaagcacgttcctggtctcggtgaccaagacgttctgacggcaatcttcaaccgctgttttaccgcttcctaccaccatggcctccctgggtcttaccgacgcgaccggacttgtcggcgttgccgcctacgttgccgcgcattttgccgtgcaggtcctgcacaaatccccgaccggcaggctggccgtcgtcctcaacgtgatcgggccgagctgcatcctgatctcgctgaccggcgccttcaacctggcgtcgttcctgacccagtgcttctggctggggctgacgctgctgggctggtggcgcaaccggcgggcggggcatgcggtggtggaaacgctgggcggaccgcgcccgggacagcccgtgcagcagtaacgaagagacggccaggacgcttggcaacgacgatacaaatcttccgttgccttggctcccagccgtttctatactcaccgcgaaacactattggtaatctaattaacctacagtgaatcgacaagaaacccgaaagcctgagacccgtaacgggccgcatggcaaccccgggatgacaacaggagacaaggatgagaaacgcccccagaatccccgccagccattcccgaccgtcgtaacccccggcaggcagtaccgcaacgtacccacccagaccgcagacggcagaccgtgacggagcgcagctccagataaacggcaacccgggaagcaaggagacatcgtgtattcacagaaagacgtgctgtcgatcggcgcgcaggcgccgatcgcccccgcccaaccgcagcagcaaacccaatcgcatgaactgcagcgcaccctgacctggaaggatgccttctgggtcaccagcggcgtgcccgcgggcgtgctcttcaccatcggcggcgtgtccgccaccatcggcaacccggcctgggtgatctggatcctcgccatcctggtcggctttgcgcagtgcttcgtctatgccgagatctcgggcctgtatccgcacaaatccggcggcgcctcggtgtatggcgcgctcggctgggtgcgctacagcaagtttgtcgcaccggtctcggtgtggtgcaactgggtggcctggtcgccgatgctggcgctgggcaccagcctcgccgccggctacatgctgagcgcgctgttcccgcccgattcggtcatcaacacctggcaactgacactggtggacctgggctttgtcagcaaaggcctgacgctgcgggtgaactccaccttcatcctggccaccgccttcctgctggtcaccttcaagctgcagcacagcggcgcctcggccgcggccaccacgcagcgcatcctgggcattgcctcgctgacgccgctggtgctgatcgcgctggtgccgatgttcaccggcgacatgccgtccaccaacttcctgccgctgctgccgctgacccatgacggcgccggcgccccggtgctgggcggctggaacgccgccggcatcagcaccgccatgggcgcgatgttcctggcgtgctggtcgaccttcggcttcgagaccgcggtctgctacacccgcgagttcaaggatccgcagaaggacaccttcaaggcgatcttctggtccggcgtgctgtgcctgttcatgttcatcgcggtgccgatcgccttccagggctcgctgggcctgtcgggcatgctggaaccggccatcgtcgacggctccggcgtgggcgcggccatggccaagttcgtcggcggcggcgcggtggtgttcaacgtgatcgtggtgatgctggtgctggcgatcctgctgatcgtgatgacctcgatgatgggttcgtcgcgcacgctgtaccaggcctcggtcgacggctggctgccgcgctacctctcgcacgtgaacgagcacggctcgcccacgcgcgcgatgtggacggacctggtgttcaacctgttcctgctgctgatgtcgaactacatggcagtgctgtcgatcagcaacgtctgctacatgatcttcgtgttcctgaacctgcagtcgggctggatccaccgcatggaccgcccggactgggcccgcccgtacaagtgcaagaactggctgctggcactgggcgcgttcttcggcttcttcgacctggccttcgtcggcgccggcgccaacttccagggcgagcacacgctgcgcaacggcctgatcgccgcgctgctgatcgtgccggtgttcgtgtaccgccactacatccaggacaagggccgcttccccgagtcgatgcgccgcgacatggagctgcccaatgcgcgcgccggcgtgctgccctacgtggcgctggtcgtcggcgggctggtggtgtggatcgccgccaggctgacggtgatcacctgacggctccggcaggccggcccggtgccggcctgccccccttcccgatttccctgctttccctgaattccgaggtaccgccatgactgacacgctccgcgtgcgcgtcggccgcgtcgagccgctggccgccggcatcaagcgcttcaccctgcaaccctgcgacggcggcgcgctgcccgccttcgacagcggcagccacgtggtcgtccatatggacggcggccggctgcgcaacgcctattcgctgaccagcacgctgggcgagcccggccactaccagatcgcagtgcggctggaagaggcttcgcgcggcggctcgcgctatatgcacgagcaggtcggcgaaggcgacgaactgcatatcggcgcgcccggcaacctgttcagcctggaccacggcgccggccgccacctgctgatcgccggcggcatcggcatcacgccgttcatgacgcatatccaggcgctggccgcgcgcggcgcggcgttcgaactgcactactgcttccgcaacgcccgttccaccgccttcctggacgtgctgcccgccacgctgcagcccggccagcttcacctgtacgagagcgacagcggcaccatgctcgacctcgccgcgctgatcgccgcgcagcctgccgacacgcacgtctatgtctgcggcccggcgccgctgaacgacgccgtggtcaacgccgcgcgcgccgcgggctgggacgcgggccgcatccacttcgagcagttccgcaacgaggtcgacgccaccggcggcgccttcgaggccgtgctgcagaaaagcgggctgacgctgcaggtcggcgccgacgagccgctgctgcgcgccatcgagaaggcgggcatcaaggtagactgcatgtgccgcgaaggcatctgcggctcctgcgagaccaccatcctggaagggcaggccgatcaccgcgaccagtacctgtcggatgccgaaaaggctgcgcagaagacgatgatgctgtgcgtgtcgcgctgcaagggccagcggctggtgctggatctctgaccatactgaggccattcgcaacctttcggttgcgcttccccgtccggtctcctaacatgcaaccacaacgttgcccattcatgcctgaacaaggagaccggacatggcttcatccaccgaccgcatcgagcgcagcatcctgctggccgcccccatcgaacgcgtctggcatgcactggccgacgccgacaccttcggcagctggtttggcgtgaaattcgacggcgtgaccttcgccccaggccagcgtgccgtgggcagcatcacctatcccggttatgaatacctgaagttcgacgtagaggtcgagcgcatggaaccaccgaggctgctgtcctggcgctggcatccggcgccgatggagcgcggccgcgactattcggccgaaccgcccacgctggtggtgttcgagttgaaggaagccgaaggcggcacgctgctgaccgtggtcgaatccggcttcgaccagatcccgcccgaacgccgcatggaagccttccgcatgaacagcggcggctgggacgggcagatggaaaacatccgcaagcatgtcagcggcgcagcctgaaaccccgcccgcgctcgaactgcgcgatgcggcgaccgtcttcgccgcgcttggcgacgaaacccggctgcggctggtggcagcgctgtgcgcgggcggcgcgctgtcgatcgcgcagctgaccgcgggcagcgccatgacgcgccaggcggtcaccaagcacctgcaggtgctggcgcaggccgggctggtgcgcgacagccgcgccggccgcgagcgcctgtggcagttcgagcccggccaggtcgaagccgcgcgccggtcgctggaagcgatcgggcggcaatgggattttgcgctggcaaagctgaagctggcggtggaagccgagcattgacctccccccgcacgccagcggtttgctcccctctcgcaagcaatggacaccctttcactcgccgctatactgggagccccgcccatcacagcgagaggaagcgcgcagtggctgaccacgacctgtccaggctgaaaatcgaccggagcgccgccgcggccggcgccggcatccgcccccggcgcaggtggctgcgctatgcagtgatcgcgctggccgtgctggccctggccggcatcgccatgaagctggccgggccgcaggcggtgcagaccgccaccgtcacctccgcctatcccacgcagaatttcaccgtgctcaatgccaccggctatgtcgtgccgcagcgcaaggcggcggtcgcgtccaaggcgcagggccggctggaatggctgggcgtgctggaaggctcgcgcgtgaagaaggacgagatcatcgcacggctggagagcaaggacgtcgccgcctcgttcgcgcaggcccaggcacaggtccaggtggcgcaggccaacctggcgctgcagcaggccgagctgaaggacgccgaggtgaacctgcgccgctcgaagatcctgatcgtgccgaacgccatctcgcgcacccagtacgacgccgacgtggcgcgctttgacaaggcgcgggcctcggtcaacagttcgcgcgcggcgatcgcctcggcccaggccaatgcccgcgcggccgaggtcgcggtggagcagaccgtggtgcgcgcgcccttcgatggcgtggtactggtcaagcatgccaacgtgggcgacaacatcacgcccttctctgccgccgccgacaccaagggcgcgatcgtgaccatcgccgacatggagacgctggaggtggaagccgatgtcgccgaatccaatatcggcaagatccgcgccaaccagccgtgcgagctgctgctggatgcgctgccgggattgcggctggcggggcaagtgtcgcgcatcgtgccgacggtggaccgctccaaggccaccgtgctggtcaaggtgcgctttgtcgaccgcgatgcgcgcgtgctgccggacatgagcgccaagatcgccttcctgtcgcgcaccgcctcggcgcaggaccgccagccggtggtggcggtgcagcccgccgccgtggtcacgcgccagggccgggagctggcctatgtggtgaaggacggccgtgcgcatgaggtgcaggtcaagaccggcgacaagctgggcgaactggtggccgtgcagggcgtcaagcccggcgacgtgctggtgctgtcgccggccgacaatctcggcgacggcgaccgcatcaccgtggccaagccgtagagaggaccacatgagcgcagcaccgctggtgcagatcagccacctcgccaaatcctaccggcgcggcgtgcagaccgtgccggtgctgaccgatatttcgctcgatatcggcgaaggcgaatttgttgcgctgatgggaccgtcgggctcgggcaagagcacgctgctgaacctgatcgccggcatcgaccggcccgacagcggcacgctgcatgtggcggggctggacatcacgcggctgccggaggccgagctggccgactggcgcgccgccaatgtcggctttatcttccagttctataacctgatgccggtgctgaccgcgttcgagaacgtggagctgccgctgatgctgaccagcctgccacgtgcggagcgtcgtgcgcgcgtggaactggtgctggacatggtcaacctggccgaccgcatgagccactacccgtcggagctgtcgggcggccagcagcagcgcgtggcgattgcgcgcgcgctgatcaccgaccccgcgctgatcgtcgccgacgagcccaccggcgacctcgaccgcacctccgccgccgagatcctggcgatgatgcagcggctcaatgccgatgccggcaagaccatcatcatggtcacgcacgatgcccacgccgcggccgcggccgggtcgctggtgcacctggagaagggagagttgatccgtggcgagattgcctaagtcgtcatgtacgcactcaagctgatcacccgcaacgcgctgcggcacaagctgcgcaccacgctgacggtgttcgggttggtgatcgcggtactggcgttcgggctgctgcagacggtgatcgatgcctggtatgcgggcgcgtctgcagcatccagcgcgcggctggtcacgcgcaatgcgatctcgctggtgtttccgctgccgctgagctacgaaagccgcatcaggggcgtcgacggcgtgacctcggtggcgcgctccaactggttcggcggcgtctaccgcgatcccaagaacttcttcgcgcagttcgcggtatccgataactacctcgacctctatccggaattcatcgtgcccgaccagcagcgcgccgactaccagcgcgaccgcaagggcgcgctggtcgggcgccagctggccgaccagttcggcttcaagcttggcgacgtggtcccgatcaagggcaccatctaccccggcacctgggagttcgtggtgcgcggcatcatggaagggcgcgacgagagcaccatcacgcgccagatggtgttccactgggaatacctgaacgagaccgtgcgcaagcgcaccccgcgccaggccgaccaggtcggcgtctttgtgctgggcgtggacaaccccgacaacaccgccgcgatctcgcgcaatgtcgatgcggtgttccgcaattcactggcggagacgctgaccgagaccgagcaggccttccagctgggctttgtcgccatgtccaaccagatcatcgcggcgatccgcgtggtgtcctacgtggtgatcgtgatcatcatggcggtgatggccaatgccatggcgatgagcgcacgcgagcgcaccgtggaatacgccacgctcaaggcgctgggcttcggccccggcttcctggcgctgctggtgttcggcgagtcgctggcgatctgcgtggccggcggcgcgctcggcatgctggcgacgccgccggtggcaagcgccttcaagcaggccgttggcggcgtgttcccggtcttcaccgtgtcgccccagaccatgcagctgcaggcggcctgcgcgctggcggtgggcgtctttgccggcatcgtgccggcggtgcaggctgcgcgcgtgcgcatcgtcgagggcctgcgggccatcggctagcgcgcggaggctgatgtggcgatcccgctgacctatatcgcgcgcaacctgtgggccaggcgcctgaccaccgcgctgaccgcgggcgggctggcgctggtggtgttcgtctttgccaccatgctgatgctggacgccggcctgaagaagaccctggtcaccaccggcgagcagaacaacgtggtgctgatccgcaagggcgccgagaccgagatccagagctcggtcaaccgcgaccaagccagcatcatggagatgcacccggccgtggccatgagcggcgctggccggccgctggcctcgcgcgaggcggtggtgctgatctcgcttaccaagaccagcaccgggcagccgtccaacgtcgtgatccgcggcatctcgccgccgggcatggacctgcgcccgcaggtgcggctggtgaccggacgcatgttccggccgggctcgtccgagatcatcgtcggcagcagcatcgccggcggctttgccggggtgcagatcggcgagcacctgcgctttgcccagcgcgactggaccgtggtcggccacttcgacgccggcggcagcggcttcgactccgagatctggggcgacgtggaccagctgatgcagtcgttccggcgcaatgcgtattcgtcgatggtggtgcggctggcggattcggcgctgttcgaccgctttcgcgccgatatcgacgtcgacccgcggctggccgacgaggccaagcgcgagcaggccttctacagcgaccagtccaaggcgctgtccagctttatcaagatcctcggcttcacgctgtccaccatcttttcggtcgcggcgatgatcggcgccatgatcaccatgtacgcctcggtggccaaccgcgtggcggagatcggcacgctgcgcgcgctgggtttcaagcgcgtcaacgtgctgaccgccttcctgatcgaagccgcgctgctggggctggtgggcggcatcgcaggccttgcgtgcgccacgctgatgcagttcgcgtcgttctcgaccaccaacttccagaccttcgcggacctctcgttccgcttcatcctgaccccggccatcgcgctgcagacgctggcgttctcgatggtgatggggctggcgggcggattcctgccggcggtgcgggcggcgcgaatgaatatcgtggacgcgttgcgggcgcgctgagcgagggttcgctcccctctcccgcaagcgggagagggagcacggcatcggcattcacggcccggtagtcgctgcgccccacccccaacctttccttgccttattccacccgcgcgtctacaacccgtagtgatgcatgctccccgtcaggcattgccggcggccagtgcacccccggcacggccagcggcgcccgatggcaaggtacccccgcaaccctctccgccaggacgcccccgatgaacctcgacctgctgggctcgctgctgactgccgtcgtggtgctgctgatcggcacgctggtcaaccgcagcgtcggcgtgctgtcgcgctacaacattcccgaccctgtcaccggcggcctgctgttcgcgatcatcgcctcggtggcgctggcggcagcgaacttccgcgtggtgatcgatcccggcatgaagccggtgctgctgctgatgttcttcggcggcgtcgggctctgcgccgacctgcgcatgctcaggcgcggcggcaaggcgctggtgatcttcctcatcatcctgctgccctacatcctggtgcagaacgtggtgggcgtggccatggccaggacgctggacctgcatcccatcttcgggctggtgagcggctcgatcacgctggtgggcggccacggcaccggcgccgcctatgccgagcgctttgccgaggtcaacaacctgcaggcggtgatggacctgtcgatgacagtggccaccatcggcctgattgtgggcggcatcatcggcggcccggtggcgcagtacctgatctcgcgctacaagctgcgctcgaccgcgcgcgaggccggcgacaccgaggaagaagccgccgcggtttcccccatcaccaccgtgggcgcgctggcctcgctggccggcatcctggccgcggtgatcggcgggcgctggatcgccgcgcagatgcccaccggcgccatcaccatccccggcttcctgtggtgcatgatgctcggcatcgccatccgcaacctgctgccctttgccggcgtgcgctttgacgaccgcgccaccgacctgatcaccaatatctgcctgtcgctgttcctggtgatgaccatgatggcgctggacctggccgaggtggcgctgtccgccggccccttcctgctgatcatcgccatgcaggtggtcttcatcatcctgtatgtggtgctggtgtgcttccgcttcatggggggtgactacgaggctgcggtcacctcggccgcctttatcggcttcaacatggggtcgaccgccaccgccatggccaatatgcgcgccatcacgtcccgctacgggccggcacccaccagctatttgatcacgccgctggccggcgcgttcttcgtcgacctgatgaacgccttcgtgctgaccatgctgctggcgttgccgctgatcggaggctgacatgcgccgcgccctcttcaccctcctcattgccttggtggccagcgcctggctggcaggctgcggcggcggcccgcccgccgacggcatccgcgccggcatcaacgagcggctggcgcaggcgctgccgccgggcacggtggaactggccggcctggaccggcgcggctcgcaggcagacaccaaggccccggccggtgaaacccgccgcgtggtgtacttcgatgcggaactgaaactgctgcgcgactacgacttcggcgcctgggactcgcccggcgtggccgggctggtgtcggcgctgggcgcgggcccgcgcggcatcaccggcatcaccagcggcggcaacaaggccggcgacatcatccgcgcgcatggcacggcgctgtaccggcgcgacggcgagcgctgggtcggcgtgctgccggccggctaccgccccgctgaagccccgaccgtcgccaccgatgcgcaaaggggcccggcggcgatcctggacgcgatgcgcaaggtgatcgagtccgtgcagaaggatgcctcgccggcgcagcgcgccgtgatcgagcaggagctgaccaccgcgcacgccaacatccgcgcgcggctggcacgggtcaacgagggctatgccattgccgccggcgccgaacacggccagtacctgcgcttcgcgaaggcgctggtggacggggcacgcgtgcgcgcgatgccgctggtcacgcacggcggagaagagaacctgcggctgctgcgcgccggcaaggtctcggtggcgctggcgcagggcgatgcggcgctggaagcctacgagggcaagggcgtgtttgccgccgacggcccgcaagcctcgctgcgcgccatcggcagcctctaccccgagcccgtgcacgtgctggtgcgcgacgccgatcccgcccgctcggtgtcagagctgcgcggcaagcgcatcgccgtgggcgagcgcggctcagcctcgcgcgtgaccgcgctgcgtgtgctggctgcgcatggcctgaccgacaaggacttcaaggccgaggaagttgggctgggcaccgggctggtggcgctgcgccagaagcaggtcgacgcggtgatccaggtgatcggcgtgccggccgacagcatccgcgacgcgctcggcgaaatgccgctgcggctgctgccgctggacgaacgggtcatcaccgcgatggtcgggcagaaggcgggctatttccgcgccaccatcgcgccgggcacctatcccggcctgcacacgccggtgcgcaccatcgccacggcggcgatcctggtgaccgggccggacctgtccgataccgaagtggccgagctgacgcggctggtctaccgccacgggcgcgactttgtcgcccgcggcagcgcccagggcgcgcagattgccgtggcaacggcgcgtgaagggctgatgatcccgcagcatctggcggcggccaaggcgctggacgcgctggcgacacccggcattccgcccgccaagcccggcggaacgcccgcgaagcccgttgcaacgcctgcggcttcgggcgcccgtgcgcagtaaggcccggcgggcgggccgccgatcagcccgccgcgctcgccaggccttcagccagccggcagcgccggtccaggaaatcgctggcgtggccgttgctgccggccgcgctgtcgacgggctggtcgatcacgacaaagcctgccccgccctgccgctcccgcacataggtgacaaagatgccgcggtccggcggcgctgcggcggcgccccccttggtgccgtcacgcacgagctggaaagggtcgaccgccagcaccggcgcgctggctggcacaaagatcgcgcgcaccggcttgtcctcgagccgcagcgtggtccagccggtgccgatcggcccggccgcgccattgaccacggcgcgcgcggccgagctgatgcaatcgagatggatatgcagctggtcctggctgcgcgaggcgcgggaattgatcgcgaggcccagcatgtcgtcgggcacggccttgccaagcgagcggccaacgatgccgcgcgcggcccagccgaaggcccaggggttggcgcctgcgccgtcccaggctctggcgtcgtcgatgccggtcatcgtccgtgccgggatcaccaggtaatgcgacttgccgatcgcgtccttgtagagcaccagtccctgggaccgatccacttgcgcgcaatcgggatgagccgccgcggtactgccaaggcagcgctgctgcacgttgcgccacaagccatcgcggccgcccgacaggacgccgacgacgctttcggcggtgcagccggccagggccaggatggccgccagccacaacgcgggggcaccgcgccaaccgcgggccggcttcagcgccggcacgaaactccgtagaaagtcccggcgcgtggattagacaccacataggcgtggcgctgcgcccagaactgcgcggtacggaaggcttcggcctcgcgctcgctccagtccgttgcaagcaacggcagggcttcggcatcggtggtgagataaacccgcgcctgatagcgggcggattgcagcgtgccggtacggatggtgcggatcgtgacgtggagggtcataggcagcttctcgactaggcgactaccaaatcataaccacttccgtgtgttggattggtgaaaccgttgcgaatgtgctaaggcaccacagatctgtcaggatccggccccggcgccgacatacccgcatcctcatgccttcgggagaaaaacatgccgcccaacccgctccgcaagtccgccatccttgtgctgacccaccttgccgcgctggccgtgggctttgccgcgggcatctatgtcctgccgatcctgacggagcaggccggtgccagtgccgagcaagtgcaggctgtatcacaacagtcgcgctacaccggcaccttccgcaaggacttggcaggcagcgacgcgctgcactgggccagcggccaactccatgtttcgccgcaggcgcttgcctttgaaggcagcgttgcaccggggccggactatcggatctacctggcgccggagtttgtcgacaacaaggaggccttccttcggatcaaggaccggtcgctgcaggttggtgaactgaagacctttggcaacttcaccgtggcgttgccggctggcgtggatccggcacggtatggggcggtggtgatttggtgtgagaggtttgggcagtttatcggggcggcggggtatcggtagtcatcgccatgccgccggatatcgcgatgtcgcgcttggcgacaacaagaacaccccgcaaccaaagggcgaagaccagagaaaaagaggccgatcaaatcaaccggcccaacgaccccccgcaataccagccgcaggtgtcgatatgacagtcaagcgcccgcccatgcaggcatcacaacctgccaggcgggcatcaggcagttacgctcagaagcgatgacgcaggccaacggtagcaccggtctggttctcaccagccaccaccgtgccaacaccattcaggcccagcgccgaacccgacttgttcttcgagtacccaacattcaggtacacatccgtacgcttggacagcgagtagtccgccgacagcacgaacatccacggatccgcgtcgctattgcgggtgtcgttgtagtaggccgcgccggtcagctggaaggcaggcgtgaagcggtactgcgcgccagcccagtacacgttgctgcgggtcgaaatggcgctggcgctcgacacgccgtcgtccttcagccagcggtagccggcaaacaccttggcgccgccaaaggcataggccgtacccaccgcggcgcgcttggcggcacggtcctgcaacgtcacggtggcgccctggtactggtcgtaggcagcgccgaccgagaagccgcccgcggcgtacgacaggccgccgccgaagttgcgcgcgaccttgggctcgcccgggacttcgccgttgttgtcgcgaccgaagctgtagaagccggtggcggtcaggccgccgaacttgccggtgtacttgatggcgttgtcggcgcggccattgaaggccgagtcaacgctgttcagcgagtagcgcgggcccacgcccatcgggtcgaaggcgccgaacaggtcgtacagcgcgttctgctggcggcccagcgtgaccgcgccccagccgccctgcaggccgacgtaggcctggcggccgaacaggcggttgccctggcccgaggtgccggtatcgatgtcgaacccgctctccagcacgaagatacccttcaggtcgccgcccaggtcttcggtgccgcgcaggccccagcgcgagccggacaggttgccagagttcaggcgcgttgccgtaccctgggcgccgttgctgcccggcacgtggctgatcacttcgacgccggcatcgacgatgccgtagagcgtcacgttcgacgcggactgggccgacgccaccccggatacggccgacgcggccgctgctgccgtcattgcaaggagagctttcttcactgtaatttctctgtgttctgtttgaggcacgacaccgcgccggacccaggccgggtcggcaaggccaaccaggtccagccgggcaacccggcaacggcgcatcgtccgcacaagttgcggcctcggcattgtcgcggcgcaatatgtaacctttgtgacccatgcttcgtagcaggaagtgacggatagccccaaatgggggttttccctgtaaccaaggggaacgttttggtacgatgcatgcttttccgacgacggtaatgccagtgccccgtgccgccatgtgcctgtgcctcgaccgcttcgcctcatgaggctggctgagatcaagacccggcttgccccgctgctcgcctcgctgcaggcttcattgcctgcccccctccagcaacgcctgtcaggcatggccgcgcgccttgcacgcgccggcctgacccggcccgggtcgctgcgccccacgcggcgcggcgtgctggtgggcctggccgccatcccggcggccctcctgctctatgtgctggtcctgatcccgttcacgccgggcatcagcgatatccgcaaggccaagtccgagcagccggcccaggtgctgtccgccgacggcaaggagctggcggtgttcaagtgggccaaccgcgactgggtgccgctgtcgcagatttcacccaatgtggtggctgcgctgatctccaccgaagaccaccgcttctaccaccaccacgggctggattggcgcaggctggcctcggccgcggtgcataccttctccggcgaccgccagggcgggtccaccatcacccagcagctggcccgcaacctctatcccgatgaaattggccgcgcgcccacgctgacgcgcaagctcaaggaagccatcaccgcgctgaagattgaggcgctctataccaaggacgagatcctcgagacctatctcaacaccgtgccgttcctgtacaacgcgttcggcatcgagatggcggcgcgcacctacttcgaccgcccggcgcgctcgctcgacgtgctgcagagcgccacgctgatcggcatgctcaagggcaacagctactacaacccggtgctcaaccccgagcgcgcgctcgaccggcgcaatatcgtgctgggccagatggtcaagcgcggcaagctggatgcggcgcgctacgagcagctgaagaagcgcccgctgcgcatcgacttcgagcgccagaccgagccgccaggccccgcgccacatttcgcgcagcagctgcgcaagtggctgatcggctgggccgaccgcaatggctacgacatctacgccgacggcctggtggtgcataccaccatcgacgcccgcctgcaggccatggccacgcaggccgtggtgcagcagggcaaccggctgcaggccatcgccaacgcggcctgggcgccgcgcgcgggctgggccgccaacctgccgctggtgcaggccttcgtgcgcgaaaccccggagtaccgtgccgccatcgccgccggcaccgcgccggaagaggcgctgcgccatctgatgtccgaccatgccttcatgcgcgcgctgcaccagcagaagacgcgcatccaggcgggcttcatggccatcgatccgcgcaacggcgagatccgcgcctgggtcggcagccgcgactacacccaggacgcgttcgaccacgtgcagcaggcgcgccgccagccgggctcgaccttcaagccctttgtctacggcgcggcctttgaagaaggcaagacccccgacgacacgctggtggaccagccggtggaaatcgaactggctggcggcgaggtctggcgccccaccgatgaaggccgccccaccggccgcgccatgacgctgcgcgacggcctggtctattcgcgcaacaccatcaccgcgcagctgatgcacgaagtggggccgacgcgcgtggcgcggctggcgcgcgacatgggcgtgcgcgacagccagctcgacgtggtgccgtcgctggcgctgggcaccagcccggtcacgctcaaggagatggtggccgcctacggcaccatcgccaacgccggcgactacatcgcgcccaccatggtgacgcgcattgaagaccgccagggcaatgtgctgcaggtgttccggccggcgcgcgccgagcacgcgctgcccgccgccaccacgcaaaccctgctcgacgtgatgcgcgacgtgatcgaccgcggcaccggcgccagcatccgctcgcgcttcggcatccgcgccgacgtggccggcaagaccggcaccacccaggacaatgccgacggctggttcatcctgatgcatccggaactggtggcgggcgcctgggtcggcttcaacgacagccgcgtcacgctgcgcagcgactactggggccagggcgcgcacagcgcgctgccgatggtgggcgacttctaccagcgcgcgctgcgctcgcgcatcgtcgacggccgcgcgcgctttgccgagcacgaagagaccagcctgttcgcatcgctgggaacgcagctgcgcggctggttcagccagctgttcacgcgcgacaaggccagcgagaccccggcgccgcgcccggcaccgcgtcggccggcgctgcccacgccggaggccgaggtcgcgccgccggccggcgcggcatcgtctgccgcggtggatgtcggcccggatgagtccagcctggcgctggatcggggggagacggtgattgcggtgccgcaggacatgagcgcgggcagcgctccggttgcgccaccccctcaggccgaaccagcgcctaacgccgcccctgcctccccggcttccgcaaatccgcccgcaccgcctgcgcccccagcgcccatcacgcccctcgcgccaaccatcatcaccccagccaacggcagcaactgaacgcccctccggacagcgcggcgcgggggctacaccaacccgatatcccgcccccgcacccccggaaacacctgcgccagccgcgcctcatcgagcccgtacagcctgcggaagaccccgcccagcaccgcccggtactcattgcgcaccggccagtcgcggttctggttgagcgtggcttgttccaccgctacctgctcaccaatgatgcggccgccacgcacggtgccgcccgcgacccagtagacggtgccgtggccgtggtcggtgccgcgcgtgccgttctcgcggaaggtgcggccgaactcggacagcaccaccacggtggtcttgtcccacacaggacccatctcggcggcgaaagcagacaggccgcggccgaggttgtcgagcaggccggccagttgcccctgtgcgccgccctggttgacgtgggtgtcccagccacccacgtcgataaagcccaggttgaagcgctcgcgcatcaagcccgccatgcgccgggcctcgacctcgaatccgcgcgcgctgagcgagcggcggttggcggcctgcatttcctgcatgcgcgcggccatggtgccggcgtcgttgcctgacatgccgggctgcggctgcgcctggcgcgccaccgtttcgcgcagctcgaagccttcatcgatcagcgattcgaaacgcgtgccacggtacatctgcgccagcagcttcgcctggcgcgcatcgaacggggcgcggccgctgcccttgagcgagacattgggcacgtcgcgcggaccggacagcaccatcggcaggccgtcggtgaaggccacgggcgcggcctgcccgcccatggcctgcgccaggcggttcaggaagccgctgccgcgcagcgcggccacggacttgcggtcctcgccttcgccgggcaagccggcctcgatcccgtcctgggtctcgaagtggctgcgcgacaggtcgtgcgtgccggcgaacggcacgaaggccaactggccgcgctgccatagcggcagcatggtcgcggccaatgccgggtgcagcgcccagtcgccgatgccgcgcgcggcgctgtcggcggcaaaagccggcgccagcgccactgccgcgttggggtcagcgtccgcaccggccgcgggcgggcggcgaatggcgatattgggccgcgcggcgtaatagaaatcactgccggccggcaccagcgcgctggtgccgtcatagccgccgcgcaggaacaccagcaggaagcgcgcatcggcccgcgccggcagcgcatagacacgcgaggcgatggcgggcagggccagccccagcgtggcgccgcccatcgttttcagccattgtcggcgttgcatggtctgctccctgtcagcgctgcatccactcgggcgacccgagcagcacggtattccattcggcctgcgattccgcctggcccagcgcggcgcgcgtggcggggccaagggtggcttcgatggtgtcgaagtacagcttgttgccgatcatcggaaagcgcgcgccgcgcggcctcgcgtcatcgccggcaaacaatcccgccggccccgagccgatcgcgcgcgcgatctcgaagcgccgcaccatctggcccgagctggcccacgcgctttccgacgatggatagccgtccggcgccacgtggccgtagagcggctcgccgagctggttcagccagttcatcaccgggcgcaggttggtcacgggacgaccttcataggcgagccgcatcgacgacaccacatagaccatcggatccttgaacttgcgcgtgggcgccgccagttgccggtccagttccggcgccaggaacaaggtgcgcagcaccgcggcgatatcgccatcggtgtacgtgaaggtctgcgccatgcgctcgaccagcgccggcggcgggttgtcggcgatgaaataggcggccagcttggcgctgataaagcgcgcggtggccggctcgcgcgccaggatcgacaccgctcgcgccacttcgtcgaagccggccggctcgatgcgctggcccagcagcatcttcgcaccgaagtcatggcgcgcggggttgaattcgaacaaaccctcactgcggtacagccccgcgcgcgccggcggcagccgcggcagcggcgtgccgcgcaggttgacgcccacgccggtcagcacgcgcgccagctcctgcacgtcctgctgggtgtagcgggagccgctggggccgcccgatacgcccatggtatgcagctccatcagctcgcgcgcgtagttctcgttgatgcggttggcgctgctctgggtgttgtcgaggtagaccagcatggccggcgcggtcacgctggccatcagcaggtcgcggaagcggcccagcgcgtgcgggcggatggcgcgctcttcgtagtcggccagcagcagccggacctggcccttgcccgagtagacgttgaaatggttcatccagaaccacgtcatttgctcgcgcagctgcgccggagaatacagcgcgcgcagcaggtggcgccgcgcggcatcggccacgatctcgcggccctgcgcgttcagcgcctggcgggcctgctgcttgctgtcgtcgggcagcgcgtcgatgcgctggcgggcgtcgcgtgcggactggatctgcgcggcggcatcggcctgcaggttgggcaaggctgcgatgacggccgccagttcgggcggatcggccagcggcagcgtcagttgctggtcgaggaagcccttgcggcccagccggcgcaggtcgccaagggtggtctggtcagcgccgtaggtgacagtgttgagccagcgcaggtcggtggcggcggtgctgccgccagcctcggccggcacctgggcgcaggcggccaggcacgctgccagtgccagtgccgcggcggcccgccaggcggcgagcgcgccccggccggattgtctcgaatgctgcgccggattcatgccttgctcctcgccctgttcgatcaacatcactatgttacgtggcaagcgcacattggttgacccggaggcgccgccggagtgttaccagtgctttcagcacgccgattgccggatttgccaagacagcggcgcgctgcctggctagccttgcgctctgtccctccgatcccgcccccggcggaaacgcctgcttgcatgtcgcgccccctgtccgctgccgcctggctgcccaccgttggctttgtcctgatctggtccaccggctttatcgtcggcaaggccatcgtgccgctggccgataccagcctgttcctgctgggccgctttgccgtggcggcgctaatgttcgtggcctggtcgctggcggcgcgcgcggcctggccgccgctgcgcgaggcgccgcgccacctgctggcaggcgcgctgatgcagggcatctacctgtgcgccggctacggcgccgtggccaggggcctgccgccgacgatcatggctctgctaggcgcgctgcagccgctgctgaccgcgctgcttgccatccccctgctgaaggagctaccttccaggcggacgtggcagggcctggcgctgggtgcgctcggcgtcgcgctggtggtcgccccggcgatgcaggccggcattcacccggccgcgtcggccctgtcgccctggatcgtgctgctgggcgtgctggccattgtctccatcaccatgggaaccctcttgcagaaacccgccatcgccgcctgtgacttgcgcgccagttccgcctggcagaacctgggcgccatgctggtagccgccgcgatggtggcgatccaggccgccgacgcgccgctgcactggcatggtggcgtggcgctgtgggccggactggcatgggcggcgatcggcctgtcgggcgccggcacctggctgctggtcagcctggtgcggcgtggccaggccgccaatgccgcggcgctgatgttcctggcgccgccgctggccgcgctgcaggcctggctgctgttcggcgaacggctggatgcggtgcaggcgctgggcatggcggtggccggcgcgggcgtctggctgtgccagacccctggcaggttgcggcatgccgaagcccgctgaaccccaagcctcgccgctggtcgagcatcggcgctaccgcccgcagcctgacggccaccagcacggctaccaccagttgctgttcggtctggccggcgccaccgagctggagatcgacggccacgtctatcgcgtggacgaccgcaccggcctgatcgtgccggccggcagccatcatgaattcctgggcttggacggcaacctgcagctggtggcggacttcccggcgcgctcggtggcactgcccgcgcggctgatgacgcgcccgcgcacgttcccgctggacggcgccttcggcagccgcgtgcgcgcgctggcggcatggcgcgccgccgcagcagcacgcgggccgcagaccgactggcacctggcggcaacgctggccgcggcgctggcggactgcctcggcatgcccggcgacgagcaggtattcccgctgatggccgttgatgcctacctgcgcgccaacctggccgcgccactgcgcgtggcggaagtcgccgggcatttcggctggagcgtgcggcgcttccagaccctgtttgccgaggccttcggcgataccccgcaccgctaccagacccggctgcggctggaccgcgcgctgcagctgctgacgcaatccacgctgccgctggccgagatcgcgctggcgtcaggctacccggaccagaccaccttcacgcgcagcttcacgcggcgcttcgggcagccgcccggggcgtggcgggcggccgcacgcggctagcctgcctgcgcggtagtcgattctggcaccggactaaccgtggtgaccctctcgcgtcgaggcgagttagagggcggcgcaggttgaacgtgcggcgtataaggcttccgccccttgcgagatccgagcgcttagcgccgcattgatctgcgtcagactcagatcatgcagggaagctattgtgtcaatagggccccgcgagtcccgatatcgcatcggactcaacggtctgcttgcccagtttcccaggagggcgccatggccaccccactagccacctcgcttccaacttcaccttccgccgcgctttccaccccgggcccgacaccgcttgccgcctggcataccgaccatatccatttcgcctcaatgctcgacctgctggaaaagcaggtcagcaccttccatcagggcgagcagcccgactacggcctgatggccacgatcatccaatacctgcgcaactatggcgattgcgtgcaccacccccgtgaggatgttgcctacgcgctgctcgtggaccgggatcccggcacgcggatcatcatcagccggttactgcaggaacatcgcgtgatcgccacagtcggcgcggaattgctcgaccgcctgcgtgaagcccagagcgaggtggtcacctcgcgagcggcactggaagcggccgccgccatgtacctggtgtactaccgcaaccatctgtccaccgaggagaaacaggtcatgccgcgcgccgcccggttcctgaccgaagcggactgggcggaggtcgccgccatcgatccggccagtgccgatccgctattcggcgccaatgtggagaggcgcttcgcgactttgcgcaagcagatcgacagtgaagcgaacgcgtccatgcactgaacgtcggtcgcttcgcggcactgccgggcctcggctcagaacttatgcctgcggcgagtgtcttggccctggcagaaaccgtcccgggctttttaacggcatccggcaacagcaatgacggacaggtattgcagcctatttgccgctctggcggcccagcagcaccgtctcgccggtctcgctcgagtgccggcgcagggcgtcgcggaccgaggcgccggtgccctcagcccaccctcagcctcgccatgacgatggttcttctatagcaaccactccccgatcatccgcaggatctccgccttcacggctgcagggtccatggaagcccggttcaggcggtgcacggagataccgcgcagcaggctcatcaggatgaaggccgcggattttgtgtccacgtccgcccggatctgcccaagggtcttcgcctcgttgagcttgtactcgacgtaggccatgttcttttcgttgtagtcgtggacaaagccatgcagcggcgagtcggcaacggacgagtcaagcacgatgaaaaacatcgcgcggatactgttgaccgcgttttccggccgctgggtgtaggcgtccaccagcgaatagatgccgtgaatgccgcgggtatcgctgccgtccttcttgcgctgggcattgaattcacgcgagagctgttccagacattcctccagcagcttttccttggagccgaagtgattgtgcgccaggccgcggctatagcccgccttggtgccgacttcattcatcgtcagcccggcgaggcctttttcagaaatcagctcgattgcggcctgcaccatacggctgacagactcctcacgccgttgctcctgggtgcgactggtttgctgtttcataggtagtgagcgatatgtcgcctgcggcgcgccgaccgatgcatggatcggccggctatgtctcgaagcagtggtaatggtccatggcgccgttgtggctgcgttgaacaggatatgggtctgttcacgcggagctgcacggcgcccaaattgtaccgaagcgaacgggccacttttcagaactgcgtcgacacaaggccctgcgtgcgcagtttccggcgcagcagtaaggccaggcgctcaactcggccggatattggctttttccgccacacccttgaagcgcaggtattccgcacgctggaattcccccaattcgccgagcgccttcttcaaaaaggtacccgcgcgcttggactggtatgcctttgccgcctcggtcccttgcgcggcggaaatcgctgcggcaagctccttgagcttgtcctgcggggtgccggccttcatcgagaaggacgaccacacgtaggattcaaagtccgcatagcccagttccttcatcgtcgggacattcggcaacagcttgtcgcgcgccccgccggtaatcgcgagcacgcggagcttcttggccttttccatgggggcgatgccggtgatgtcgttgagggcgatgtccagccggttgccgatcaggtccgtcaccatgggcgctccgcccttgtacggcacgggcgtggtcttgatacccgttacctgcgccagccactcgcctaccaggcgatagccttcggaataattgccgatcgagatcgggttgcccgtggccttgtagcgggccaccacatccgcaatgctgttgtagggtgaatcgttgccggccacaaaagcggcggcggagatcgccaggccgtgcagcggcaccaggtccttgaacgggtcgtagcccaggtccttcaccatcaccgggttcaccgcgatcagcgagttgctgcccagcaggatggtgttgccgtccgccggctccgccagcacagtgcgcacggcgatgaggccgctggcccccggcttgttctcgaccacgatggagcgtcccagcgccttgccgatcagctccgcgtaaaagcgcgcgccctcgtccgagccgctgcccgccgtgaagggcacgatgacgcgaatcgccttgccctgcgcccgggcgatgtaggggaaacccaacgctgccgcgcccgccagcagcgtggcgccaaattgtctccgttgcatggtgcttgtctcctgtatatcgaaatggtttggccttggccggattcagtcttcaaagaccggcagccgcctttcggccatggccttcacgccctcggccatgtccggccccgcaaactgggtagcctgctccgcgctctcgcgcgagatggcgttgcggatgtggctgagcgagtccgccttcaaggtttggcgggtggactgcaacgcacgcggcgatgaagtggccatttcccgggccagtgccatcgcggcggtgcgcacctccgcctcggggacgatgaagtccaccagccccagctcactggcgcgggcgccatctacgcgggcgccggtgtacagcaaccacgccgccatctgcttgccgatcagcgccggcagggtgtaagagagcgcgaagccagggtgaatcccgagccggttgaagttggccgaaaaccgggcctttgcgcatgacacccggaagtccgccgcgagcgccaggccaaggccgccacccacggccgcgccctcgatggcggccacaatcggcttgctgaaactgaagatgcgcagtgcctccagatagatgggattaatgcgcgaggcgctgcgcccctccgcgccattgcgccgcgaaaaatccgcccccgcgcagaacgcgctgccgcccgcctgcagcagcaccgcacggcaggtcttgtcggcctgcagccggtccagctcgtcggcaatccgggcaatcatctccacatcaaagaaattgtgcggcgggcggttcagctcgatgatggcaacatggccgtcgcggctggtcaggatggcctggttcggcgtctcagacatgggtggcggtcctttctgcatgcgtgggttgggcttggtggtcagccggcgttgccggggcatccgccgacggcagggtgcgcgcggtcaggtgcggccagaactggtccgagcctgcctggatgaacgcctggccgaggcgctctgcccattcggtgctgctgccggcctcggcacgccaggcccacaggcgccgcgtggcaaagttcagcgggtattcgtaggtaaagccaatggcgccatgcacctggtgcgcaatcgaggcacccgtgcgcaccgcgtcgctggccgtcaccttggcgaccgcggcgctgaattcagcctggggcgcgctgtcctcctgcatggcgggcagatcgcgcagtgcggtggccgcagccgcgtagctgcaggccacttcgccggccagcacggcaatctgctgctggatagcctggttcttgccgatgggcttgccaaactgcacgcggtccttcacatactgcaccgccaggtccagcgcgtaatccagcgcgccggtcagctgcgcggcggtggtggcggcgtagaacacttccagcggccggctcagcccggaaatgccagcaggcagcacatgcgccacgggggcatggtcaagcaccaccgtgtcggccggcagcgatgcggcatcggcctttggctccacccgcacgccagtccccttggcatccaccaggcagacgtggcctgccgcctccaccaccagccaatgggcatggcgcgcccacttcaccgctgtcatcgtgccggtgagggtggcgggcgtccccgcctcattgccggtcagtgccagtgcccgcgtctgcgcgccggcggccagcgcaatcacgctgccggccgccaggtccagcccgctgcgcgatgccaggtactgccccaccaccgcctgcgacagcggcaccggcgcctgggtatagccgacctggtagaacagggacaacgcttccggccacgaggcctcgatgccgccatgcgcctcgcggcagagaatcttggtcatgccggcgtcggcgatggcttgccacagtgcgccggcaaattcaccggtctcgacagcggtcagcagctcgcggctcacctcgttggccagcagtcgcttgacggtttcttcaatcatgttgtcgctcatcgcagccccagtcctttcgcaataattccgcgcaaaatctctctcgtgccccctcgcagtgagaacgatggcgccgccagcgtcaccaggttcagcacctggtcgaactcgcttccatcccccagtctgtcggggaatacctcgtaggcaatgtcgggcagcgactgctccagcagcgccccctggtccttgacgatggaggcggccagcgacgggtcctgcccctcggccatcatcagtgcgatgccctgcgacatctggcgcaaggtggcatagcgcgcgatcaccttgccgatggccacggcctgctgacggttgcctgcctgcgccgcatcgagcatctccagcagcagttgcgtgctgctcaggaagcgctccgcgcccgatcgctcgtacttcagttcattgatcacctggctccagcccttgccctcctcgcccaccaggtggtcatcgggcacgaacacgtcgtcgaggatcacttcgttgaagatgcgcgtgccgagctgcgagacgatgggccgcaccgtcacgccggggcggtccatctcgatgaagatctggctcatgccggcgtggcggtcatcgccacgttccctggtgcgcaccagggccaccatgtagtgcgcatggtgcgcgcccgaggtccacaccttgcggccgttgatcttccagccgccttcgaccttggtgccgcgggtccggatggaagcgaggtccgagcccgagtccggctcgctcatgccgatgcaaatgaacgcctcgccccggcggatctgcgggatgattttgggagcaagctggtcgcggctgtagcggatgagcagcggccccatctggcggtcggcggcccagtgcgcgcccatcggggcacctacggccagcagttcctccagcatcacatagcgctccagcatgctctttccgccgccgccgatgtcggttggccaggtcatgccgagccaccccttttcgcccatcttcctggagaaatccgggtcgcggccggcccagttgtatgcccgctcgacgcgtgaatactttgtgatgtgctccctggcaaaggctcttgcctcctcccggagcgcctcgcattcgggtggcaggtccccgaccgtgacgtgcaaagtatccatgtttatccttacttgcttgcgaacaagcaacactatagagtggatacaacgaatctgctctaggtaataacgatgagaagcgaggcaaccatgaacgcaagcgacatgacgaacgaccagaagaagccggacgccaccgctccccgaggccctcttgccggtatccgcgtgctggatctgaccgcggtggtactgggtcccgtcgccacccaggtgctggcggactatggcgccgaggtgatcaaggtagaacctcccgagggcgacctgatgcgtgcaaacggcgtgagccgcacgcccggcatgagttccaccttcatgaatatcaaccgcaacaagagttcggtgtgcatcgacctcaaggcggaagaaggcaaggcacagctacgccagctgatcggccgctgcgacgtgctggtgcacaacatccgcatcaaggcgatcgagcggctggggttcggctacgattcggtggcgcagatcaacccgggcatcgtctactgcgccgccaccgactttggcgagggcggcgcctttgccggccagcccgcattcgacgacatcatccagggcgcctgcggcctggcccatctggtgggacacgaaagcggcgtccctgactacccgcccaccctgctggccgacaagatcgcgggcctggccacggccaacgccatcctgggcgcgatcgtccacaaggtccgcaccggcgaaggccagtacgtcgaagtgccgatgttcgagacaatggtcgccttcacgatgacggagcatctgggcggccacggctttcagccgcccattggcgacgccggctatgcgcgcctgctcaagggcggccgcaagccctcgcccaccaaggacgggtacatcgccctgctgccctatacggagcagcactggaaggccttctttcaccgcttcgggcgcggcgaattcatcgaacagttcaacatcagcagccggatcgagcgcaacaagaacatccaggcgatctatgcggagctgcgcaacatcaccgcgcggtacaccacaaaagagatgatggacgtgtgccgcgagatggatatcccggtcgcggaaatgtattccatccacaccatccagacccatccccaggtacaaagcaccgggctgttccagaccatgacgcaccccaccgaaggcgacgtggtaaccacccgcccgacggccctgttctccaggtcgcctgcttccatctataagcctgcccctcgtctcggcgaggatactgagcgggtcttgggttccaggtccgtgaaatgttcgaattgaagccgaacctgaaaaacacggccaagcagccgcccattgatcccaaagtggagaaagcgtctaatcatcaagagaagggacctgaagtgacgaggtctgtatgcactgcacaaactgcggatccgagaaccctcctgacgcgaggttctgcaaggattgcggatcacgactgggccgacgctgcccgcactgtggccacgactcgggttcggccgacaggttttgtaccgcatgcggcgcatcgctggccttacccactgtcggcccttccgatgaaaaccagctgacggcggcgcccgctcccatcgactacaccccacgccacctggtcgaacgcatcctggcgcagcaggcggcgatggaagccaggggcgcgaccgccggcgagcgcaagaccatcacggcgctgttcgccgacatggcgggttccacggcgctgatccacgacctggacccggaagaagcgcgccgcctgatcgatcccgtgatcgcgctgatgatggaggccgtgcaccactacgaaggctatgtcgccaagtcgctgggcgacggcatactggccctgttcggtgcgcccatcgcgcatgaagaccacccgcagcgcgcgctgtatgcggcgctgcggatgcaggaagcgatgcgccgccacggcgaccgcatccgcctggagcaaggcataccgctccagatccgggtgggcatccacaccggcgaggtggtggtgcggtccatccgccgcgacgacctgcataccgactacgatccggtaggacacacgatcaacattgcctcgcggatggaaagcatcgccacgccgtcgtccattctggtcagcgaggcgacctgcaggctgacggaggggtatttcgacttcaaggccctgggcgcaacccaggtgaagggcattagggagccgcttgccgtgtatgaagtgctgcgcctgggcgtgttgcgcacgcgcctgcaggtggcgcaacgccgcggcctggcgcagttcgtaggccgcgagggtgagctggcgcaattgcgtgacgcgctggagcgggccaaggcgggacacgggcagatcgtgggcgtggtcggcgaggccggggtcggcaagtcacggctgttccatgagttcaaggtgctgtcgcagcgcggctgcatggtgcttgagaccttctcggtgtcgcacggcaagtcgttcgcgtacctgccgctgatcgacctggtgaagaattatttccagatcgagccgctcgatgatgagcgcaggtgccgcgagaaggtcgccggcaggatgctgatgctggaccgcacactggaagagctgctgccttacctgcttttcctgctgggtatcagcgagccgggttcggcattgccgaacatggatccccgcatccggcgccagcgcaccttcgacgcaatcacgcgcctgctggtccgagagagccacaaccagccgctcgagttgatcttcgaggacctgcaatggctggacagcgagaccgaggcgttcctggatgtcctcgccagccacctgccaggtgccaggatcctgctgctgctcaactatcggcccgagtaccagcatggccgacatcagccggaccgttacaccgagctacggctcgatccgctgggccaggccgaggcccaggaactgctcgccgcgctgcttggcgacgatcccgcgctgatgccgctcaagcggctcatcctggacaagaccgagggcaatccattcttcatggaggaagtggtgcagaccttgtccgaggagaaggccctgctcggcgaacctggccactaccggatcgagcagaccccgatcgcgctgcatattcccaccacggtccagggcgtactggccgcccgcatcgaccggctgccccgccccgagaaagacttgctgcagagccttgccgtgatcggcaaggagttttccctgagcctgatccagcgcgtggtctcccagccggaggaacagttgcagccgctgctggccaggctggaggccggcgaattcatctacgagcggcccgcattcccggatacggagtacatgttcaagcatgcgctgacccaggaagtcgccggcagctcgctgctgaccgaggagcgcaccgcgctgcaccaacgcacggcgcaggcaatcgaagccctgttccagcatcagctgaaggatcactacagcgagctggcccggcactacagcctgagcggcaatgaaccgaaggccgtcgagtacctgcagtgcaccggccagcaggcagtgcagcgctccgcgtaccacgaagcgatccgccacctgaatgccgcgctggaattgctccagcgccagcccgattcgcccgaacgcgcccgccaggaactcacgctgcgccttgccatcgggccggcgctgatcgccgccaggggctttgcctcgtccgaggtcgaaaccacttacagccgtgccctggcgctgtgcggcgaggtcggggagaccccgcagctttttcccacgctggtcggcctgcgcacgtatttctccctgcgcgccgagcatcgcaaggcttacaagctgggcaagcaactgcttgcccaggccaggaagacgcaggacccggagctattgggcgaggcccatgtctcgctcgccacgaccttgtattactgcgggaagttcagggcctccgatggccacctgcgagatgcgctcgccctctatggcgccaaaccggatcacgtccatgtgaatatgcatggcgtcgacccggagtcacgggcgctatccttttcggcattggtcctgtggaatctcggctatccggaccaggcctgcaagcgagcacagagttcgctcacgctggcccggcagctgtgccatcccttcagtctcgcgcatggcctctgcctggcggccgagctgcaccaattccgctgcgacccaaggctcacgctcgagtgcgccgacgcggccatcgcgctctcaagcgagcagggcttccccgtgtggcttgcctggtcgaccttcctgcgcggttgggccctggccgagcaagggcagcatgagcaaggcatcgcgcagatgcgccaggggctggcggcgtaccacgctaccggcgcggcgctggggcattcgcacttccagcaactgttggcgcagatctacgcacgcatgggacaggtggattcagccctggacgcgctagccgaagcgcaagacgcggtgcaaaggaccggtgagcactattgcgaagctgagtggcatcgggtcaagggcgagatgatccttcacggctgccgttctgatggccttctgtctgaagatgacgcgcaagcgtgttttcaccaggcgatcacggtagcccgcaagcagaatgccaggtcgctggagttgcgggcctcactgagccttgcacggctctggcaacgccagggcaggcccgagccggccaggcaactgctggaccagatccgcggcgcatttaccgaagggctggacagcgcggacatgcgcgacgtcgtggcggcatgccgttgatgacgatttcgccgccagcggcgatttgcgccagtgtttacattctgaatctcctgatttccactcaggccgccctggcggccagtgcgggatagtcggtcagcccgcgtgcgccaccaccaaacagcgtgtcgcggtcatgggggttgagcgtcgcgccagcgcgcaggcgctccggcaggtcggggttggccacgaacggccggccgaaggcaatcagatcggcccatccctcgttcagcgcggcctgcgcacgttccgcggtgtacttgccggcgtagatcagcgtgccccgatacacctcgcgcagccgctgcttgaatgcggcgggcatatgcggtgcatcgtcccagtcggcctcggcgatatggatgtagcccacgcccagctcgccgagcagctttgccgcggccgcataggtggtttccggatcggcgtcgacgcagccattgagcgtggtcagcggcgccaggcggataccgacccggtccttgctggccgtgccctcgatcagcgcctgcgtcacctcgcccaggaaccgcaggcggttttctagcgagccgccatattcgtcggtacggttgttggcttccgagtcgatgaactggttgaccagatagccgttggccgcgtgcagttccacaccgtcgaagccggccgccatcgcgttgcgcgcggcctggcggaattcgtcgacgatggcgtggatctcttccaccttgagcgcgcgcgggtgggatgcctgcacgaagcccggcttgccatcctgatcggcgacgaacacgttcacaccgtgcgccgggatggcggacgacgacaccggtgcgtggccatcgagcagactgacatggctcaggcggcccacgtgccagagctgcgcgaagatgcgaccgcccgcttcatgcacggcagcggtgaccttgcgccagccggcgacctgcgccggcgtgtggatgccgggcgtccacgcatagcccttgccgagcggcgaaatccaggtgccctcgctgacgatcaggccggcgctggcgcgttgcgcgtagtactcggccatcagttcgttcggcacgtcgtcgggctggcttgcgcgcgaacgcgtcatcggcggcatcacgatgcgattgggcagcgtgagggcacccagcgaatgcggctggaacagcggatcgtgtgtatcggacatcatggcctcctcagtcccaggccggggccaggccctcggggctgacctcgcggccgttgcgctccagcgcggcgatctgggccatgtcgtcggcgtcgagcttcaggtcgcgcgccagcaggttgctggccaggttctcgcgcctggtcgacgatggaatcaccgcatagccgagttgcagcgcccatgccagcgcaacctgcgcgacggtggcgcggtgcttgttcgcgatctgcgccagcaccgggtccttcagcaccttgccgtaggccagcgtcatgtacgacgtcacggcgatgccctgctccttcaggaacgcggcgagcttgtggttctgcagataggggctcagttcgatctggttggtggcgatttcgcccttgccaaccgcatcgagcgcctgcttcgtcagtgcgatattgaagttggaaacaccaatctgccgcgtcaggcccagcgccttggcttcggccagcgccgccatgtattcgggcagcgccacgccattgcccggcgccggccagtggatcagggtcaggtcgacgtagtcggtgcgcagcttgtccaggctttcgcgcaggctcggcacaagcttgccggcggcgtagttcgccgtccagatcttggtggtcacaaacagttcatcgcgcttcacgccggccttggcgatagcctggccgacgtcggcctcgttgccgtagatctgtgccgtatcgacggcgcgatagcccaggtccagcgcgttgcgcaccgaatcgatcacggcctggccggtcaggcggaaagtcccgacaccaaatgaaggaacgctcatggtgcaactcctatgaaggaaactcgaatgcacgcagtttgccgcccttacctttgcggataaagccgtgtataagggaaattcatttgatttgaaatcaataatgaagacgaccatcgacgaactgctggcctttgccgccgtggtggacaccggctcgatcacggcggccgccgagcagctcaagctgacggtctccgccgccagccgcaccctgggccggctggaggagaaactgcagaccacgctgctgcggcgaaccacgcggcggctggagctgaccgaggaaggggcggcattcctggaacacgcccgcgccatcctggcgatggttgacgaggcggaagagcagatcgcggcgcgccgcctgcggccggttgggcgcttgcgggtggatgcggcaacgccgttcatgctgcatgtgatcgtgccgctgctggagggctttcgcgccagctacccggaagtggaactggaactcaactcgaacgaaggcatcatcgacctgatcgaaaagcgcaccgatgtggcgttccgcatcggccagctgaaggactcaacgctgcatgcgcgccccatcggcaccagccgaatccgcatcctggccagtcccggctacctgaagcgccacggcacgcccaccaagccggcgcagctcgcgcagcatgcgctgctgggcttcacgcagccggaatcgctgaacgactggccgctgcgcgacgacgacggcagcgtgctgcatatcaagccaaccatcgcctcgtccagcggcgagaccctccggagcctggccctgaacggccagggcattgcctgcctgtcggacttcatgacgcgcgacgatcggcaagacgggcggctggtgcagctgtttgcgaaacagaccctcgatgtgcgccagtcgatcaacgcggtctactatcgcaacaccgcgttggcgtcccgcatcacctgctttgtcgagtatgtggtcaaggtgcttggccagaagccgttcgagagctagttttcatatttgatgccagatcaaaagtatttgaccgatacacggcttaatctgcaaagatgaaccgggcaaactgcgctccatcgaaacccattccctggagcacaaatgagccccctcttcaagccctttgccatggccgagcaaacgctatccaaccggatcgccatggcgccgctgacccgttcgcgcaacccggacggggtgcccaacgatctcaacgcgctctactacggccagcgtgccgacgccggcctgatcgtgaccgaaggcacggtgatctcgcccagcgcgcagggattcctgttcaatccgggcctctacacgccgcaacaggttgaaggctggcgcaaggtgaccgacgcggtgcatgcgaagcgcggaacgatcttcacgcagctctggcacgtcggccgggtgagccacgtctcgatccagcctggcggcatccagccggtcagcgcaaccgaccaggttgcgaagaacaccaaggcctggggctataccgccgacggcacgcccggtgcggtcgatgtatccgcgccgcgcgcgctggccagcggtgaggtctacggcgtaatcgccgatttcgcggaagccgcggccaatgcgatcgccgccggcttcgacggcgtggaacttcacggtgccaatggctacctgatcgaacagttcctgaacccgacggtgaacgaccgcaccgacgaattccgtggcgacacgctggaaggccgtacccgctttgtactggctgccatcgacgccgtggcagcccggatcggcgcgcatcgcacggccatccgcctgtctccctatggcggactgggcgacatggccgagtaccctgagctggagcagacctatctccatctggccgacgagctctcgaagcggaatatcgcctacgtccacctcatggaccagagcacgcgcggcagctcggccacgccgggcgacttcctggcaaggttccgacgtcgcttcacgggtgcgctgatccttgcgggtggcatgacacgcgcacgcgccgagcagctgattgccgatgacctgatcgacattgccgccttcggcgagccgttcatcgccaaccccgatctggttgcccggcttgagaacaactggccgctggcctcgtcggaccgcgcgcaccactacggtggcggcgccgagggctacacggactatcccgcctacgacggcgccgccgcagcctgaactgcgccagaccacctcgcgcagcttcacgcggcgcttcgggcagccgcccggggcggggcgggtgtccgcacacggatagcaaggctgcactcagtccatcgagccacacgattgcgcgcgggggtgtcgccgctcaggtcgtcagcaatttttcctgattttcaccacgaattcagcaacaaatacccgcgttatctgattaacctgcccgctattttccgtttacggcccgccgcggacgagaaaatagctgctcccgccggccccacgaaggccggcgcggcctttctgatgacacggagacaacgacacatgagtgcaagcgcagaacatctgcaacgcggcctgggcgaacggcatatccggctgatggcgctgggttcggccatcggcgtgggcctgttcctgggcgccggcaatgccatcaagatggccggccccgccatcatgctgggctacctgatcggcggcgcggtgatcttcctgatcatgcgcgcgctgggcgaaatggccgtgcacaacccggtggccggctcgttctgccgctacgcgcaggaccacatgggcccgctggccggctacctgaccggctggaactactggttcctgtggctggtgacctgcgtggcggagatcaccgccgtggccatctacatgggcatgtggttccccgacgtgccgcgctggatctgggcgctggccgcgctggcggcaatgggctcggtcaacctgatggcggtcaaggcctatggcgagttcgagttctggttcgccatgatcaagatcgtcaccatcgtgctgatgctgatcggcggcggcgccatgatcgtgttcggctttggcaacggcggtatcgccaccggcatctcgaacctgtgggcgcacggcggtttcatgcccaacggcgcctccggcgtgctgatgtcgctgcagatggtgatgttcgcctacctcggcgtggagatgatcggcctgaccgccggcgaggcgcgcaacccgaagaagtcgatccctgacgcgatcaactcggtgttctggcgcatcctgatcttctacgtgggtgcgctgttcgtgatcctgtcgctgtacccgtggaacgagatcggcgcccagggcagccccttcgtgctgactttcgagcggctgggcatcaagaccgccgccggcatcatcaacttcgtggtgctgaccgcggcgctgtcgtcgtgcaatggcggcatcttcagcaccgggcgcatgctgtacaacctggcgcagcagggccaggcgccgcaggcctttgccaaggtcgaccgcaatggcgtgccgcgccgcgcgctgctggtgtcgatcgccgcgctgctgtgcggcgtgctgctcaattacctggtgcccgagcaggtcttcgtctgggtgacggcgatttccaccttcggcgcggtctggacctgggccatcatcctggtcacgcagatccagttccgccgcagcctgtcggcggccgagcgcaaggcgctggccttccgcatgccgttctggccctatggctcctacatcgcgctggccttcctggcgctggtggtggcgctgatggcctacttcccggagacccgcgtggcgctgtacgtgggcccgggctggctggtgctgctgacggtgtgctactacgcgctggacatgcgctcgcgcgggccagtcagctaccgcgcctgagcttgccgtagccagcggggtgcgccggccggcgcgcctcgctacaatggctcccgggcaatccaacgccagggggccgaatgtccgagaccactgaggttgctggcaacgcggcggctgcgccgccgcgcaacagcgccgccgatgccgaggcccgcgccatcgcggttgccgatacggtcgcgcgcactgccgtcgagcaggccgaccatgccatgcgccactggaccgaccccaccgcggggccggtacgcatcggctccgcgcagcacctgcagatgttctgcaatatgctgctgcagacccacaacccctacaaacccgccgtgatcgactggccgaagctgtcgccggaggccctgcaccgcgtcacctcgctgccgatctgggatatcgccgtgcagaccgagggccgcgcctcgatccgagtcaagacctttgcccagaccgtcagcgatccgctgctgcgcatcgcgctggaaatggacggcggcgaagaggcgcgccacaaggtggtgctgtcgaaactggtcgaggcctacggcatcgcgctcgcgcccgagcctgactacccgcccccggacgatccggaatggggctggctggttaccggctacagcgagtgcatcgacagcttcttcgccttcggcctgttcgccgcggccaggcgctccggcttcttccccgccgagctggtcgagaccttcgagccggtgatccaggaggaaggccggcatatcctgttcttcgtcaactgggccgcctggtaccggcgcaccctgccgtggtggcgccgtccgctgtttgcgctgaaggtggcgcgggtgtgggccttcctggtctgggagcgcatcggcatcgcgcgcggcatcgacaccgacggcgtggcccaggacgccaacttcaccatgaacggctcggcggcgctgggcgaagccctgacgccgggcgcgatgatcgacctgtgcctggccgagaacgaccggcgcatggccggctacgacgcgcgcctgctgcgcccggaaaccgtgccgcggctggcccggctggcgcggcgcttcgtcaagtagggccggcccatgcaccttgcgttggcattgtcgctgctgtcgctggcggtctggctggtgctgatctttgcccgcgcgggcttctggcgcgtgcgcaagccggctgccgcaccggatcccgcagcctggccggaggtggtcgcggtcatccccgcccgcaacgaggccgacgtgatcggccgcgccgtggccggcgtgctgggccagcgctaccggggccggctggcgctggtggtggtggacgaccacagccaggacggcaccgccgatatcgcccgcgccgccgccgcggccaccgcgcgcccgcgggggctgaccgtgatcggcgctcgcgagctgccggccggctggagcggcaaggtctgggcgcagtccgaaggattggccgcggccgacggcatcgccccgcaggcccgctacgtctggctgaccgatgccgatatctggcacggccccggcgtgctggccggtctggtggcgcgcgccgagcacgaacggcgcgacctggtctcgctgatggtccggctgcgctgcgaatccgcctgggaacggctgatcgtgccggcctttgtcttcttcttcgccaagctctaccccttcgcccgcgtgcgcgatgcccgctgccgcgtggcggccgcggccgggggctgcatgctggccagccgcgcggcgctggcgcgcattggcggctttgccgccatccgcggcgagctgatcgacgactgcggcctggccgcgcgcatcaagcccggcggcgcgatccggctggacctggccgacgacagcgtgtcgttgcggccctacaacgactggcgcagcctgtgggacatgatcgcgcgcagcgcttatacgcaattgcgctactcgccgccgctgctggccggcgcggtggcgggcatggtgctgacctacctggtgccgccggtgctggcgctcggctggcggctgtggccggcatggctggcctggggcgcgatgaccctggcctacctgccgatgctgcgcgaataccggcagccggcgtggctggcgccgctgctgccggtcacggcgctgttctacctgggggcaaccatcgactcggcacggcgctactggctgcggcgcggcgggcagtggaagggccgggcgcaggcgccggtgcggtcctgagcgctccctgccagcttagcgcttgtcgagatacccctgcgcccggaaccactccagcgcgtcccgcaaaccctcctggtatggccgcggctgatagcccagcaccttgcgcgccttgtctgatgtaaagaacatccggtaccgggacatattgagtccatctacagtgatgaacggctccttgccggtaaagcgtgccgccgcctccgccccgtacgccagcgggtacagcggccagcgcggcagctgcatggtcggcgggcgccggccgcacagctgcgcgatgtcacgcagcatctgctgcagcatcacgtcctggccgcccaggatgtagcgctcgccggcctggccgcgttccagcgccaggaaatgcccttcggccacgtcatccacatgcgccaggttcaggccggtatcgacaaaggcggggatcttgcccgtggccgcctcgacgatgatgcgcccggtcggcgtcggccgcacgtcgcgcgggccgatcggagtggacgggttgacgatgaccgccggcaggccgcgctcggccaccagtttttcgaccacgcgctcggccagcaccttgctgcgcttgtaggcgccgatggcctcgtgcgggcgcagcgccgcggtctcgtccaccggcgcccgcgcgccggccacgcgcagcgtcgccacgctgctggtatagaccacccgctcgacgccggcctgctgcgcggcctccatcacggccagggtgccgtcgacgttagtgcgcacgatctcctcggggtccggcgcccacagccggtagtcggcggccacatggaacaggtagcgcacgccctgcagcgcggcagccaccgcgccggcgtcgcgcatgtcgccttccgccacgctcaccggcagcccggccaagttggcgcgcgggctttgcgggcgcaccagcacgcgcacccggaagccgcgtgccagcgccctgcgcaccaccgccgagcccagaaagcccgaggcgcctgtcaccagcacgtcatcgtttttcgtcataagcccgttttcccgtgaggcggagtcgccccgggccagcctcgcgctggccaaggcgactccagacaaagccggcgtgtcgggtatatagtaaccaccgtgcgacggaaatgtgatctgcggtggatctccggtggatgccggtgcatttcctgtcccgccatcccaaacactgaaacccgttgcaaagggtcggggggcttactctatgcaggtgattcttgctcagccccggggcttctgcgctggcgtggtgcgcgcgatcgagatcgtcgaccgcgccctcgtcaagcatggcgccccggtgttcgtgcggcatgagatcgtgcacaacaagcacgtcgtagagggactgaaggacaagggggcgcgcttcgtcgaagaactggacgaagtcccgaccggcgccgtgacgatcttcagcgcgcacggggtctcgcgcgaggtcatcgccgatgccagccagcgccagttgcatgccatcgacgccacctgcccgctggtgatcaaggtccatacccagggccgccagtacgcggccagcggccgcaccgtgatcctgatcggccatgccggccacccggaagtggaaggcaccatgggccagatcccgggcaaggtgatcctggtgcagaacgaggccgaggtcgcgcagctggacctgcccgccgacaccccggtcgcctatgtcacgcagaccacgctgagcgtggacgacacccgcaatatcatcgccgcgctcgggcgccgcttcagcaacctggtcggtcccgatacgcgcgatatctgctacgccacgcagaaccgccagagcgcggtgcgcgacctgtgcaagctggccgacgtgatcctggtgatcggcgcgacgaacagctccaactccaaccgcctgcgcgagatcggcactgaaagcggcgtgcccagctacctgatcgccgaaggcgccgagctggaccccgcctgggtgcgcgacgccaacgtggtgggcatcaccgccggcgcctccgcccccgaggaaatggtcgaggacgtgatcaacgcgctgcgccggctgggcccggtggatgtcaccaccatggccgggcgcgaggaacatgccgagttccggctgccgcccgaactggccgacgtaaagccgcaatcggccccgcgcaaggccggcaaggaacccgccgcagtcgcggccgcaccggccaccgccaacgagaatatcgccggctgaacccaaccagaggaagctgccttggctattccgctactgcaggtcgcccgcgtgggcgcctacatcgtcggcaagcatctgtcgcgacagaagcgctatccgcttgccctgatgctggaaccgctgttccgctgcaacctggcgtgctcaggctgcggcaagatcgattatccggatcccatcctgaaccagcgcctgtcggtgcaggaatgcctggaggcggtggatgaatgcggtgccccggtggtgtccatcgccggcggcgagccgctgctgcacaaggacatgccgcagatcgtgcaaggcatcatcgcgcggcgcaagttcgtctacctgtgcaccaatgcgctgctgatggaaaagaagctggaccagtaccagcccagcccgtatttcatctggtcggtgcacctggacggcgaccgcgagatgcatgaccgctcggtgtgccaggaaggcgtgtacgaccgctgcgtcgaggcaatccggctggccaagcaacggggtttccgcgtcaatatcaactgcacgctgttcaacgatgcccagcccgagcgcgtggcgaagttcttcgactcggtcaaggcgctgggcgtggacggcatcaccgtgtcgcctggctatgcctatgaacgcgcgccggaccagcagcacttcctgaaccgcggcaagacccgccagctgtttcgcgacatcctcagccgcggccgcgccggcaagaactgggccttcagccagtcgacgctgttcctggacttcctggccggcaaccagacctaccactgcaccccgtggggcaacccggcgcgcaccgtattcggctggcagcgtccgtgctacctggtgggcgagggctatgccgccaccttccgcgagctgatggaagaaaccgactgggacgcctacggcaccggcaactacgagaagtgcgccgactgcatggtccacagcggctatgaggccaccgccgtggccgacacctttgcccatccgctcaaggcgctgggcgtgagcctgcgcggcgtgcgcaccagcgggccgatggcgcccgatattgcgctggaccggcagcggccggcggaatacgtgttctcgcgccacgtcgagatcaagctcgaggaaatccagcgcgcgaaaccgcgcgccaaccggccgcggccggccgaggccaacgccgcggccacgcactgaccgcactaccgatggccgcggaacttgccgccaccctcccaggcgctgcgctgacctgcgtgtcggcggcctatgcgctggccgcggcctggctgtcgcatcgcgcgccggcggcaagcggcggcaccgcgacgacgccggtcagcgtgctcaagccgctgtgcggcgccgagccccggctgtacgagaacctggccacgctgtgccggcagcggcatccgtcgttccagctggtattcggcgtgcatgccgcggacgatcccgccatcgccgtggtcgaacggctgcgccgcgacttcccggcgtgcgacatcgcgctggtggtcgatccgcaagtgcacggcaccaacctgaaagtcagcaacctggtcaacctgttcgcacaagcgaagcacgatgtgctggtgatcgccgacagcgatatcgccgtgccgcccgactacctggcgcgcgtgaccgcgccgctggccgacgccggcgtgggcgtggtcacctgcctctaccgcggcaatccgactggcgggcggtggtcgcgcatcggcgcgcagttcatcaacgactggttcgcgccgtcggtgcgcatcgcccacgcgggcggctcgcaacgctttgcctttggcgcgacgattgcgctgcggcgggatgcgctggtttcggtcggcgggttcgaggtattggcggaccggctggcggatgacttctggctgggcgagctgacgcggcgacaagggttgcgcacggtgctgtcagacgtggtggtcagcaccgatgtcaccgaggaacactttgccgacctttggcggcatgaggtgcgctggctgcgcacgataaggtcgctcaatccgctgggttttgccttcacctttattaccttcacctggccgatgctggtgctgggcgtattgctggcgccgctccctgctgttcttgccctggcgaccctcggcgtgatcgcgcgcagcatgatggcgggcagcgtggccgctgcgttgcgcgcgccgttgcgcgatgcgatgctgctggccggctgggccgttgcgctgacgggcaagcgcgtgcggtggcgcgagcaggtgctgccggtacatgatgggcagcactccgggcgagcgcctgccctctcccccgcccctctcccgcaagcgggcgaggggagaaaacaggcggacagggagccgccatcgcgttattccgcacgccgtcctgcggcagcgtccgttgatgtgacgacgttgaacgcagcggcggttcgctcccctctcccgcctgcgggagaggggccgggggagagggccggcgtatccacgaagtccccacccccaaccccacccttcaccggcatccatccccagaggccgcaatgaaaaaaaccctgttcctccaggccccttccttcgacggcttcgacggcggcgcgggctcgcgctaccaggccaagcgcgagatcaagtcgttctggtacccgacctggctggcgcagcccgccgcactggtgccgggcagccgcgtgctcgacgcaccggccgacggcctgaccgtgcagcagacgctggatatcgccgcggactatgaactggtcatcatccacaccagcacgccctcgttccccaccgacgccaagttcgccgaggaactgaagcagcgcaagccggacgtgatgatcggcatggtcggcgccaagcccgcagtcgatccgggcggcacgctgggtgccagcgaggccatcgacttcgtctgccgcgaggagttcgactacacctgccaggacgtggccgcgggcaagccgctccaggacatcctgggcctgtcctatcgcttgccggacggctcgctcgaacacaacgggcagcgcccgatgatcgagaacatggacgagctgcccttcgtggcgccggtctaccagcgcgacctgaagatcgacaactacttcatcggctacctgaagcacccctatgtgtcgatctacaccggccgcggctgccgttcgcgctgcaccttctgcctgtggccgcagaccgtgggcgggcaccgctaccgcacgcgctcggccgagagcgtgatcgccgaggtcaaatggatcaaggagaacatgcccgaggtcaaggagatcatgttcgacgacgacaccttcaccgacttcaagccgcgcgtggaagagatcgcgcgcgggctgggccagctgggggtcacgtggtcctgcaatgccaaggccaacgtgccgtacagcacgctcaagatcatgaaggagaacggcctgcgcctgctgctggtgggctatgagtccggcgacgaccagatcctgctgaacatcaagaagggcctgcgcacggacatcgcgcgccgcttcaccgaggactgccgcaagctgggcatccagatccacggcacctttatcctgggcctgccgggcgagacgcgcgagaccatcgagaagaccatcgagtacgccaaggaaatcaacccgcacaccatccaggtgtcgctggccgcgccctaccccgggaccacgctgtaccggcaggcggtggagaacggctggctcgaggaaaacaaggtcatcaacctggtcaacgaccagggcgtgcagctggccgcgatcagctatccgcacctgtccagggaagacatctaccacggcgtggagaccttctataagcgcttctacttccgccccggcaagatctgggaaatcgtgcgcgagatgctgggcagctgggacatgatgaagcggcgcctgcgcgaaggcgtggagttcttccgcttcctgcgctcgcacgaggcctgatcctggcccacgcgctttcctgtgcctcgcaacgcgcgctgatcgtcaccgccgacgacttcggcctgcaccccgccgtcaatgaggcggtggagctggcccaccgcgacggcgtgctcaatgccgccagcctgatggtgggcgcgcccgccgtggcggatgcggtcgagcgcgcgcgccggctgccgtcgttgcgcgtggggctgcacgtggtgctggccgacggcccggccacgctgccgcgcgcgcggatccccgacctggtcgacgccgaagcccgcttcggctcggccatggccctggacggctgccgcttcttcttcctgccgcgcgtgcgccgccagctggcggcggagatccgcgcgcagttcgaagcctttgccgccaccggcctgccgcttgaccacgtcaacacgcacaagcatttccacctgcaccccacggtgctgtcgctgatcctgtcgatcgggcgcgactacggcctgcgcgcgatgcgcctgccgcgcgagcagggcgcgccgttgccgctgcgcccctggctggcgctgctgcgccggcgcctggaccgcgccggcatcgcgcacaatgactacgtggtcggcatcgcgcgcagcgggcagatggacgaggcagccctgctgcaggcgctggcgcagttgcccgcgggcgtgggcgagatctacctgcatccggccgtgatctctggcgaggccattaccgcatcgatgcgcggctaccgccacgccgacgagctggccgcgctgctgtcgccgcgcgtgcgcgccgcgctggagcgcgcggccaaccggcgcggcggctttgccgacgtgctggtgccctgattgttcaagatgaaacgcattgcttacctgaccggcctgatcgggctgctggcgctcaccgcactggtgatccaccaaggcgccagcgacatcgccgccatcgtggcgcagggcggctggctgctgctgttgctggtgcccctgcatgcactgccgctgctgctcgatgcgcaaggctggcgcgtcctgctgacctcggccgaccccgaggagaaggcggggctcggtttcctgtggtgggtcgccacggtgcgcgaagcggtcaaccgcctgctgccgacggtgggggtcggcggtgaactggtcggcatccgcctgacgcggctgcgcatccgcgacaccaccgccgtcaccgccagcatcgtggttgaagtgatgctgacactgttctcgcagtacctgttctcggccatgggggtgctgctgctggtggccgcgctgcaggacagcggcggggcctggatcatcctggccgggctgctgctgtcattgccggtgccggtgctgttcgcgctgtcgctgcggcacaccgcgatcttcgagaaactggaaggcgcggcgcgcaagctgtttggcgaagatcaccgcatcgtcgccttgatcgacggtgcgcggctcgatgcccatatccgcgcgctcaaccggcgccggcgcgagctgctggcggcactgggctggcaactggcagggctggtcagcggcacgctggagatctggctggcgctgatgctgctgggccatccggtgccggtctggcaggcgctggcgatcgaatcgctgacccaggccgcgcgccacgtggccttcttcgtgccggccgggctgggcgtgcaggaagcggtggtgatgctgctggggcaggtgctggggatggatgcgcaggtctcgctggcgctggcgctggtcaagcgcgcgcgcgagatcctgttcggcgtgcccgcgctgctgtcatggcaatgggtggagctgcgccactggcggcgcagccggcacacgggccacgcctcgccctgatggcgtgcggcgctcaggcgtcagacgcctggcgcgcgttatgggtggtcaggtacttcaccagcccgtcgaccccgctgcgcgcgacgatgtccgcaaactgcttgcgatacacctcgatcagccacgcccccatcatattgatgtcatagatcttccagccgttggctgtgcgctgcagccggtaatcgatctgcatctcgtcggcattgttgatcacacgcgtctgcaccaccacatcggtggcgccgctgccggacttgaccggctggtagcggaacttgacgctctgctcgcgcagttgcgccagcgacaccgcatagctgcgcacgagcagcatctggaactgctcatggagctgttgctgctgctccggcgtggccgtgcgccaggcactgcccagcgccagccgcgtggtgcgctggaaatccgtgtagggcaggaactgcttctgcaccaccgcggtaatcttggcgaggtcgccggcgcgggtgtcgggattggactggatggtgccgatcacgccctccaccgcggcctgcaccagccgctcggggctggcgcgcaggtcgccgggctggactgcctgggcgtgcgctacggaaaccatggccaccgccgcaagcggcgccaggggaagcaaaccgtgaatcgtcatcgatatgagaaccaggaaggacggtgaagcggcgccggcgctgcagcgccgatgccaggctgacagtttatagcggatcggcctgaatcgcggatgcccgggccgcgcatgccgcatgcgccacgctgccagccgatatactcgcggttcgtgctccttccggatccgcccatgctgacttcgctgctgacacgcattgtccggcttgccactgcctggccgtggcgcgtcatcatcctggcggcattgctgaccgccgtcagcggcgtctacgtggcccgcaactttgcgatcaacaccgacatcggccgcctgctggaatccgacgccccctgggcggtgcgcgatgccgccatcggcgacgcctttccccagcgcaaccagttgatcctggcggtggtgcaggcgcccgcgaccgagctggccgatgccgccgccgacgcgctggccgaggcgctgcgccgccagccggcacgcttcaccgcggtcagccagcccggcggcggtgcgttcttcgcgcgcaacggattgctgttcgccagcaccgatgaagtgcgccagctcacgcaacagctgatgcaggcgcgcccgctcgtcaacgcgctcgcgcatgacccgaccctgcgcggcctgtccgatctcctcgccaccacgctggcgctgccgctgcagatggggcaggtaaagctgggcgacatggccaggctgctgggcagcagtgcacggacactagaccaggtgctggccggcaagcccgtcgcgctgtcctgggcagggctgctcgacgacagcctcaagcccgggcccgatggccaggtctacagctacatcgcgctcagccccgtgctggactacagcgacctgcaggccggggccgccgcctcgcgcgcgatccggcaggcggcggccgagctgcagctggcgcagcgctaccaggccacggtgcggctgaccggcccgcaggcgctggccgacgatgaattcgcctcggtcagcgacggcgccgtgctcaacggcgtgctgacggtgctggtggtggtgctgatcctgtggctggccttgcgctcggcgcggctgatcgttgcggtgctggccagcctgtttgccgggctgctcatcaccgccgcgctggggctggccatggttggcgcgctgaacatgatctcggtggcgttcgcggtgctgttcgtcgggctgggggtggacttcggcatccagttcggcgtgcgctaccgcgccgagcgccatgaccgcgaccatatcgtcgaagcgctggggctggccgcgcgcgcggtgggcgctccgctggcgctggcggccgcggccacggcggcggcgttcttctgcttcctgcccaccgactaccgcggcgtggccgagctggggctgatcgccggcgtgggcatgatggtggcattcgccaccaccttcacgctgctgccggcgctgatctgcgtgctcaagcccggcggcgagcccgaggcgccgggcttcgcgtggctggcgcccgcggaccggttcttcgaccgctatcgcaagccggtgctgctggtcaccctgctcgcgatcctggcaggcgcgccgctgctgccgcacctgcgctttgacttcgacccgctgcacctgaaggaccccaggtccgaatcgatggccacgctgctggcgctcaaggacgcgccgcaggccggcaccgacgatgtcagcgtgctggcgccttcgctgccggccgcgcgcgatctggccggcaagctggcggcgctgcccgaggtggcgcgcgcggtcacgctgcagactttcatccccgcagaccagccgcccaagctgcaggccatcggccaggcctcggccgcgctgatgccggcgctgacgcagcccaccgccacgcccgccaccgacagcgcgcgcgtcagtgcgctgcgcaatgccgcgcggcagctggccatcgccgccgacgagcatcccggtccgggcgcggccgaagccgcgcacctgtccgccacgctgaagcagctggcggccgccgacgccgccacgcgcgaccgcgccgagcgcgccatcgccgtgccgctgcagctggcgctggcacggctgaagctggcgctgggcccgcaacccgtcagcgagcagacgctgccgcccgaactggtgcgcgactggatcacgccggacgggcgcgcgctggtcaacgtcagcccgaagctgccgccgcccgccagcgcacagcgcgaggccgcgctggaccgcttcatcaccgcggtgcagcgcgtggagccgaccgccaccggcgggccgatcgcgatccgcggctcggccgataccatcatggccgcctttgcgcaggccggcatctgggcggtggtgtcaatcaccatcctgctatggatcacgctgcgccgcttcggcgatgtgctgcgcacgctgataccgctgctggtttcggccatcgtcacgctggaattgtgcgtgctgttcggcattgcgctgaactttgccaacgtgatcgcgctgccgctgctgctgggcgtgggcgtcgcgttcaagatctactacgtgattgcctggcggcacggcaagacccagctgctgcagtccagcctgacgcacgccgtgctgtacagcgcggccaccaccgccaccgctttcggcagcctgtggctgtcgcagcatcccggcaccgccagcatgggcaagctgctggcgctggcactggcgtgcacgctggtcggcgcggtgttcttccagccgatcctgatgggccgcccgcgcgaaggcgcccatcacaaacatgacaaggccgcccggtcataatcacaaacccgatgcggccgaccccgacccccttcgtacaatgcctttacgccagcgcgctacatccgttgccaccaccgccattgccgccgccctgctcgccggctgcgccaccggcccgcaagccagtcccgacgatccgctcgagccgatgaaccgcgcggtcttcaccgtcaacgacaagctcgaccagtacgtggccgtgccggtggccaagggctacaaggcggtcacgccggagccggtgcgcaccgcggtcaccaatttctattcgaacatcgcggacatcggcaactttgccaacaacctgctgcagggcaagggcgttgaggcagcggagagcttcatgcgggtcgcgatcaattccgtgctgggtatcggcggactgatcgacatcgccacgcccgccgggctgcagaagcattcgcaggatttcggcctgacgctgggcacgtggggcgtgccgtcgggaccctacctggtgctgccgctgttcggccccagctcattccgcgacggcgtgggcctgtatgtgaatttccagttcgacccgaccacctatgccgagccggcggtgcgcaattcgctgttcgggatgaacgtggtggacgtgcgcaccaacctgctgggcgccaccgacctgctgaagctggcggcgctggacaagtacgcctttgtgcgcgatgcctacctgcagcggcgccgctacctgctgggagagaacacgtcgctgccggactacgacgaagacgacgacggcggcacggccgcagcacccgccgcggaggcgccggcgggcacgcctgcgcccgcgcagccgcaggcgccgcgctgacgcggggtcttagccgccgatccccagcagcaccacctcgaaggtaagcgtggcgttcggcggaatcgtgcccggcacgccgcgcgcgccgtaggccgtggccggcgggcaggtcagcttggccttgccgcccacctgcatcgcctgcaccccttcggtccagcacgggatcacgcggttgagcgggaacgagatcggctggccgcgcttgtacgagctgtcaaactcggtgccgtcggccagcgtgccgcggtagtggacctgcaccgagtcggtggccttgggcgaggcgccattgcccttgatcaggtgctggatggtcatgcccgacgccagcgtctgcggcgccgcagcgggtgcggccggggccgaggcggccggggcggcagcggaggcggcgcaggccaaggtcagggtgccgaggaaaagcgcaagtgttttcatgggaaacctggtcgtgaggtcgtgattggggatgcggcagtttaaccgacacacggcaacgatatggcggcagcggcatatagcgcacaacgcaccccggccgtgcgccttgcggcaggcatggtgcggcgcaccccgccgcatccgttacacggggcgttttgccgtctacgatggttcgtgacagccccgctgccgcgggcgcacggagattgccatggcactcacggattcacgggaccttccggtctcgacccagaacgcccgctcggtcgagcagtatgagaccgccctgcaactgctgaacggctactacggcgacccgctcgccgccatcgacacggcgctggccgccgaccccgacttcgccatgggccacgcgctgcgcgccgcgctgatggtcacctctggcgacggcatggccgagcccatgctgcgccagagcgtcgaagccggcgaagcccggcacgcccgcgccaacgaccgcgagcgccgccacatcgccgcggcacgggcctggctggacggcgagttcgagcgctcggtccggctctacggcgatatcgtgatcgactatccacgcgacctgctggcgatccagaccgcgcatctcggcgacttcctgctggggcagtcatcgatgctgcgcgaccgcgtggcgcaggcgctgccgcactgggatgccggcatgccgggctacggctacctgctcggcatgcatgccttcggcctggaagaaacccagctctacgagcgcgccgaggaaagcggccggcgcgcgctcgagctcaatccgcgcgacccgtgggccgtgcacgcggtggcgcacgtgatggagatgcagggccggctggacgacggtatcgcctggctggacgggcgccgcgacgactggtccgacgacaatatgctggccgtgcacaactggtggcacctggcattgttccagctggaagcgggcaggaccgacgaggtgctggcgctgtacgaccgctatatcaagcgccccgcgccggcgatcgcgctggacctggtggatgcctccgcgctgctgtggcggctgcacctgcgcggcgtggacgtgggccggcgctggcagccggtggcggacgactggctcggccgcggcgcggccggctactacgccttcaacgatgtccatgccgtgatggccagcctgggcgcgcaccggcccgctgccgccgaccaggtccgcgccgcgctggagcgcgccgccctgggcaacggcaccaatgccatgatgtcgcgcgatgtggggctgccggtggccgatgccctgatcgcgttcgaccagggcgattacagcaccgccatcgacctgttgatgccggtgcgcctgatcgcccaccgcttcggcggcagccatgcacagcgcgacatcgtcagcctgaccctgctcgaggcggcgctgcgcggccgccgcagcaacctggcgatcgcgctcacggccgaacgcgccgcgctcaagcccatgagtcctagcctgcaccggctggtgcagcgcgccgactcgtgccgcgcataagtctccctgccgcggccgggatcggcgcctatactgcacctgtcctgaccggagaccacccatgcccagcttccgcgccctgttccgccccgccctctttgccgccagcgccgcgctggcgctggcggccgtgccggccattgcccatcacggctggtccacctacgacgagaccaagccgctgacgctgaccggcaagatcgtcgagagccactacgagaacccccacgcgcatatccgcatcgatgccggcggcaagcgctggctggccgtgctggcacccgtgtcgcggatggaggcgcgcggcgccaccggcgacaaggtggccgtggggcgcgaggtcacgctggtcggctacgccagcaaggaaaaggccgacgagctgcgcgccgagcgcatcaccgtggacggcaagaccgtcgagttgcgctgagcgggcgcgcgccgcatgtcggtgctgttcgcgcaatggacggagtgggccggcgcgctggcgcggctgccgttcccgatggccctgcgcagttcggcctgggcctatcccgcggtagagatcgtccacctggccggcatggcgctgctgttcggctccatcttcgtggtcgacatgcgcctggccgggctcggccggcggctgccggtgagcctgctgttgcgccatgcgctgcccttcaccgtcggcgccttcattgcggtcgcggccagcggcgtgctgctgttcctggcccatgccgatgagctggccgccaatcccgcgttcctggccaagctgtgcctgattgcactggcgctggccaatgtgctgtggttccacttcggtccctatcgcagcctgcatgccgggcaaccgggctgggacagcggcgtcgcgccgccggccggcgcgcgcgtcagcgccattgtctcgatggtgacgtggtcgctggtgatctgcgccgggcgtctgattgcttatgtctgatggccgcgggactcacggcggcgccggagacagcatccccagcatggctaccagggccatcaccagcgcggcggcgcacgcctccagcagcaggctgcgccgcaacgccagcgtcgccgcccgatgctccccggcctgcaccgccaacgccagccgcgggctcaggcggaagcggttcgcggcagccaggccaagcatcgccacgaacagcgcgagttttgcgacaagcagcccgccataggacatcggcgcaagatccggcagcgccgggcccacgatgaaccagtagttgagcgcgccggtcagcagcagcgtggcaacaatgatggtgccgatacgggcaaacccgttcgaggtgcggctcagcagcaccaccgccgcccggtccgataccggccgcgccagcgacagcagcacgaacgcggccaacgcgccgacccaggcgccggcggccagcaggtgcgccacgtcggcgctcaggtggagatagcgcaaggcgccctcatgcatcgcgccgtggccgccccaggccagcgtcgccagcgcaatcccgccgaacccggccagcgcagtgaagcgcgcgcccggccgcctgcgccaggacacgcaggccagcacgaacagcagcagggccgccaggcgcaccgaccacgccagcccgaaatccgtccctgtgacgatcatggcgaagacgtgggcctgcaacgcggcgtagtcggactcccctgtcatggccagcgccatcaccacaagggcagccagcgaaagcccgatgccggcgatggcgcagcccagcgcaagcgcctggcaacgctttgcaaagcgtgaggcccgttccccccgatgcagcgcataggtgcagaacagcggcagcccgaacagcaaggccaggtcgaaatagagcgccaggcgcagcccggcggccacccagtccggctgctgcaatcacttcaccgtgaaggcaatcttgccgttgacgggatgggtatcggacgacaccgcccgccagtccacccgatagctgcccggcggcagcggctgcgtgggcgtgatcaccatggtcttggggtcgtcgctgccggagactttcacggccattttcatcggcgcatggtcagccatgcccggcatgccggtcatcaccaggttggcgccggaaaactgggtgaccaggctctcggagaactgcagttcgatcttctgcggcgcggccacctcggccttgtccgccggcgtggacgacaccagcttcgggtgcgcgaaggcgatgctgctggccagcgcggcggttgcggcaagcagggtctggatcagggggcgattggcatgcatggttgtctccgcttggggatgatgaagttgtggtgtcagaaccagacccggacaccggcgacgaaacgcgtttcgcccgccttgccgccagaggtccggatcatgtcggcggtattgccgaaggtctggtagcgctccacgccgatatacggcgcgaactgccggctgaactcatagcgcagccgcagccccacggtgccgttggacaagccgctgccgatgcccacctccgggtcgttcttgccatagaggttggcttcgatgcgtggttgcaggatcaggcgctgcgtcagcagcaattcgtattcggcggacagccgcagcgcggtgcggccgctggtgccgacataggcagtggcatcgacctcgaaccagtacggcgccagcccctgcaccccgaacgccagccagttgcgcgccgggcgcccgctgccggtgtcgttgcgcaggcccagttgcgtatcccagtagctggccacggcgtgtccccacagcagctcggtgcgggcctcgtgcagcttgcccttcgacgcttcgccctcggccttgagcaccagcttgtcgtagctgttgccgaaccacgcctgcgcttcataggcggcggcattgctgccattggcgtgggcccactccaggcggtcgaccagcaccgaggcgaacaggtgctcgtcggccatcaccagctggcgtttgtcgcccagcgcgtacttgccgacgcccagctggtagccgccggaataggcatgcggatcgcgggcgtcgggcggcgcgctgccgccctgcatcttcatgtcgccgtggtccatggcaggggcggccatgccctgcgtgtccggcgtcggcgcaccgccaccgtccatggtctggatcccgtcctgctccatgccctgcatctgcccatggtccatgccctgcatggcggccggggcatcgtgctggtgcgcatggccggcatgcgggtcctgcgcctgggctgcgccgattgcggtcaaggccagcgccacggccagtatcgtcttcttgtgcctgtgcatggagattgcgaattcaggttgaaccatcacgccaccaccacttcgcggaacatgcccgcatccatatgcagcatcaggtggcaatgccaggcccagcgtcccagcgcatcggcggtgaccaggaagctgatgcgctgcgccggctgcaccgggatggtgtggcgccgcgcctggaagctgccgtccggcgtttccagctcgctccacatgccatgcaggtgcatggggtgggtcatcatggtgtcgttgtgcaggatcacgcgcagccgttcgccgtgcttgaagtggatcggcgtcgacttgccgaactcgacgccgtcgaaggaccaggtgtagcgctccatattgccggtcaggtgcagctcgacctcgcgcccggggccgcgcgcatccatggcgccgccgatggtgtgctggtcggccagggtcagcacgcgcctgccgttgttgcgcaggccgatgccgggatcgtccaggtaggtgcgggccatgtcgacgcgcatgtcggtgcccggaccgtattcggtgcgggcgtggcgggcggtcttgctggggaccttgagcgggtcggcggcggccatggcgtgctggctgtggtccatgccggcgtggtccatgccctgcatcggcgtggcgccgtgctgcatgccgccgtgtcccgcatgaccgccatgcccgccgttgcccgtcatcgcgcccatcatgtcggtcatggtcagccattcggcccggtctagcgcgggcaccggcgccgccagcccttccctgaccgccagcgtgccgcgcgcatagccggtacggtccatcgattgcgcgaacagcgtgtaagcgtcgtcgcgcggttcgacaatcgcatcgcaggtctcgccggggccgaagcggaattcatcgaccgtgaccggttcgatatcctggccgtcgacctgcaccacccgcagcttcagcccggggatgcgcacgtcatagaaggtgttgcccgagccgttgataaagcgcaggcgcacggtctcgccacgccggaacagcccagtccagttgccggccggcgtgacgccgttggccaggtgcgtgagcgtggcgctggacaggtcggccaggtcggtcgggctcatccgcatctggttccacatgctgcgcttgtccagcgcctgcttcagcccgtcgcgcgagacgtcgcggaagaagtcgaccacggtcggctggttgtagttgtagtagtcgccctggaccttgagcttggtcagcacccgcatcggatcttcgtcggtccagtccgacagcagcacggtgtggtcgcggtcggcccgcacactttcctggcccgtggccggatcgatgacgatgccgccgtacacaccggtcatttcctggaagcccgaatgcgagtggtaccagtagctgccggtctgcgcgaccttgaagcggtaggtgaaggtctggccgggcgggatgccggcaaagctgatgcccggcacgccgtccatctcaaacggcaggatgatgccgtgccagtggatcgaagtggcctcgcgcaggcggttggtcacgcggatggtgaccgtgtcgccctcgcgccagcgcagcgtcgggccgggcagcatgccgttgatggtggtggcaatggccggcttgccggtaaagttgaccagcgactcgccgatcaccaggtcgaactcggtgccgcgcaggaccggcgccgagccggagccggccggggcagcctgcccggcgcgctggcccacatgctgcgcccacgcgctgccgccgacgccagcaaggctggccaccacgccgccggcaaccagcccttgcacgaagcggcggcggggtaaatcgggcagcacaaggcgggtactggggtggcgtcgcatgtcatcagtcctggtagaaagcatgccaagcgtagccaaggccaccctacgcacgtctgaccggaacatgacattgcggtaatcttccggtcatgttggcgcccgcgttgccggcgtagagttgccggaccctgcccaaagggccgatcgatcaaggaaagtgctgtgaaactgctagtggtggaggacgagtccaagaccggcgaatacctgcgccaggggctgaccgaggcgggctttgtcgtcgacctggtggccaacgggctggacggccagcatctggcgatgaccgagccctatgacctggtcatcctggacgtgatgctgccggacgtagatggctggcgcatcgtgcaggcgctgcgcgcggcggagatcgccgtgccggtgctgttcctgaccgcgcgcgacagcgtggccgaccgcgtcaaggggctggagctgggtgcggacgactacctggtcaagcccttcgccttttccgagctgctcgcgcgggtgcgcacgctgctgcgccggggcacggcgcagatggcgctggaccgcatccaggtggccgacctggtgctggacctgggccgccgccgggccacgcgcgccgggcgccgcatcacgctgaccagcaaggagttcgccttgctggaactgctggcgcgccgccgcggcgaagtgctgccgcgctccttgatcgcctcgcaggtgtgggacatgaacttcgacagcgacagcaatgtcatcgacgtcgccatccggcgcctgcgcgcgaagatcgacgatgagttcgagcccaagctgatccagaccgtgcgcggcatgggctatgtgctggaagcccccgaggcagcggagaacgctgaatgaaggtccggatgtcgctgacggcacggctcaccatcctgttctcgctgtcgtcggccgcggtgctgctggggctgggcgtgctgatctggctggcgatcgacaatcatttcgccgacgaggactacgccgtgctgggcgacaacgtgcggctgatccagaagatcgcgggcgaaggcccggcggcgtcgctggcgcaacgactgggcccggtgctggaacaccatgccggattcctggccgaagtgcgcgccgcggacggcaagcgcctgtatgccacgcaggacttcgacttcggcatggccctggccgccgccgcgcaactgccggcgcagcggcatgccttcacctgggaacagggtggccagacctaccgcggcatgcgtgcgctggcgcaggtgccgcccggacagccggggccgctgcaggtcgtggtcggcatggacacggcactgcatgcccacttcatgcacgccttccgccagtcgctggccttctacgccgcgctggccgcgctggcgagcgggctgctgggctggtgggccgcgcgccgcgggctctcgccattgcgcaccatggcctcgcgcgcgcgcactgtcaccgcgcacaagctcgacgagcgcatgccggtcgatgccgtgccggtggaaatggccgacctggccgcgacgctcaacgccatgctggaacgcctgcagcgcgatttcgcgcgcctgtcggagttctcatcggacctggcgcacgagctgcgcacgccgatcaccaacctgatgacgcaaacccaggtggtgctgtcgcagccgcgcgatgcggacaagtaccgcgacgtgctggcgtccaacgtggaagagctgcagcggctgtcgcgcatggtgtcggacatgctctacctggcgaagatggagcacggcatcaccctgccgaacgccgagccgatcgaggtcgctgatgaggtcgctgcgctgttcgatttctacgatgcgttggctgaggacaagggtgtgcgcatggccgtgcgcggcagtggccgcatcaccggagaccggctgatgctgcggcgggcgctgagcaacctgctgtcgaatgcgctgcggcatacgccggcgggcaagggcattgtggtggagatcttgcccgctgccgaaggggtgacggtggtcgtcgagaacgaaggcgagaccatccggcctgaactgctgccctcgctgtttgaccggttcttccgcgcggacaagtcgcgggcgcggcccgagtccgatggtgcggggctggggctggggctggcgatcacgcaggcgattgtggctgcgcatggcgggggcattggagtggagtcggagggggggcggacgcgctttgtcctgacgttcagggcgtagggagtgagggagactgcgccgtgccagcgctgatcgcatccgccggcaacccaggcagcatggcgcgtatcgcggggacgagctcccgcgtgagcaccgtccgcgtgatccgggcaatgtcttcggcaaggtcggaccattccgccattcggcaaagcaggtaaaaatcgcgctggcccagccgcgatgacgggatcggcaccagctcgacctgatccagccacacccgcgattgccagaggcaaaggggcgtgctgacggcccacccaagtcccgcagccaccaggctcagcagcggatcggtcgcatcgaactcgaatcgacgtgccgcttccacgccgatgtggcgcaggtatcgctcgacttgctggccgatgaccgagcgctgcgtgtaccggatcagcggcagatcgccgacacggtcggcgaggtcttgcgccttggacaacggcagtacatggctgcctttgggaaatacggccacccagctttcggaaaacagaagtcgctgggcaatgcgtgcttcggctaccggcacttcggtgcagatcgccaggtccagctcccggcccagcagctgggcattcaggcccggggtcaggccagaccatagctgcatttgcctggcagaccctgacagcccgcgaatcaacgccggccccaacgtcgctgcaaaggagtccacacaaccgagccgtatctgggcgtggtccagccgcacgcgcttgcgcaactcctcatccacatgccgggcctcggccagcaggcggtccgccatctccagcaggatgttccctgcgcgcgtgggcctggcaggccgcacttccctgtcgaacagctggatcccgtattcgacttcgagtgagcggatcatctggctgaccgcgctttggctgacgccgagcccttgtgcggcaagggccatggaaccggattcacagacagccataaagacctgtagcgcgtgcaggtcgggcacgcgcgcgcggcgccgagtcggggaaatcgcggagggcatgggagcggacttggccatgggcttgcctgcaacagggagcggtgtcggccactataacttaagcaaatctaaatttttctataaatatctcttcaactaaggctccggggctgccgtcgctcctaggcttgcatccagttctgatcccaccaggaaatctccatgcaaagctacgacgcgatcgttatcggagccggcgtgatcggcagttccgtcgcctgccatctcgcccgccagggctgcactaacgtgctcgtgctcgagcgcatgcagatcggtacaggaaccacctcccaatccagcggcattctgcggacgcactactcggtcatcgagaacgtccggctggcgcaagcgtcgtggcaggtgttcaacgactttgccgcttacctgggcgacgaagaggcctccgcgggcatggtcaagtgcggctacctgatcgccgcgccggatggtcccaggctgtccccgctgcgtgcctcgctggaagcccagcaggcacaggggatcgaagtgcggctgctcgatgcaaaggaagcgcaaagcctgcttccgattgcccgcttcgacgacgctgcgctgatcggctacgagccggaagccggctttgccgacgcttacctggtcgccaccggctttgcgcgggcggcacgccgcctcggggtcaggatcctcgaaggcgtcggagtcgaacggttgttgctcgacggcggcaaagtcgccggcgttgaaacctcgcgaggaaccttcctcgccggcaccgtcatcagcacccagaatatctgggcgaccgaaatcgagcgctggaccggcatcgccagcccggtcgtccccgagcgccatgccgtgctggcactggaagcggcatcgccctatacgttccagatgccggtgtacaaggacctcggctctcccggcatgctgtattgccgcagttacggcggcaggcagatgctggtcagcgagggcaccgtcggtgagacgctgtcgtcgccggacaacgagcaaggcgacatcagcatgaattacatggtcgaagtcggcgcgcaagtcgccgagcgcttccccacctatgcggacgccgggattgcttcgtcctggaccggcgtctacgacgtgacgcccgactggaacccggtgctcgggtgtctgcccgaggtaccgggtctcgtggtgggttacggcttctcgggccacggcttcaagctggctcccgcggtcggacgcgtgctggcccaggcagcgctgggcatcgagaccgagattgacatcgccccctattccctggagcgcttccgcaatggtgcgctgctgactggcaagtacggtctcggcgcggtgtcctgagcccgcgtttgcagtgctgccgatccgggtcgcagggcaccatcactccccttgtcgcggatagatggtgatggacaggaacctgatcggacacctggtcagacctaccgggccatgcggtatctcgccggcgaaggtcagggaatcgccgggttcgagcgtataggtttgctgtccgcagcgatactcgaccacgccctccagcatgtacaggaattcggtgccggggtgctggaaggtcgggtagcgctcggtgtcgtcctcgatcgtgatcaggaacggctcaaaggctttcacggggccctggtcataggccagcagatgataggtatgaccgctcctggtgccgcgccgcaccacctccatccccgctccatgcctgacatgctgcgcggcagccgacgcgccatcgtacttgctgaacagcaccgccattggcacgcccagcgcgcgggcgatacgggcaagcgtatccatgccggccatggtgctgccggtctcgatcttcgacagcatcccgcggctcaggcctgcctgttccgcgacctgggcaatcgtcagcctttcccgcagccgcagttcgcgaatgaccatgcccaccgattcctcaatgtggggcacttgggcttcaaaagggggctcggcatgggtcttcatgtgggtctctcagtcattgacgcaccaggaggatgattcatgatgggcacatttgttgctccacaggaatcatcgcagatttgcgtcccagtgagcaagtcatgcgcctggcgctgcgaggcgcattccaaagtcggaaggagccgatccatgaagtcagagttgagtgcgcatcttgcggcgccagccggggcgctgaccccggctccgcggttcaacaccgtcgaagacgctcaagactatctgctggcgcgcggcgtcagctacgtcctcgcgcagttcgtcgatatccacggcgtcgccaaggccaaatcggtgccagtggcgcatcttggctcggtcctggcagagggtgcgggctttgccggctttgccatctggggcgtcggcattgaaccgcatggcccggacttcatggctcgcggggatctcgataccatcgggctggtgccatggcagccgggcctggcccggatcgtatgcgaagggcatgtcgatggtgcgccatggcagtacgacagccgggtcgtcctgaagcggcagatcgccaggctctcgcaaggtggctacacgctttataccggcctcgagcctgagttttcgctgctgcgccgtgacgacaaaggcggcatcggtccgtgcgacccgagcgatacgctggccaagccttgctacgactacaaggggctgtcgcgcacgcgtactttcctggagcgtctgtccaacggactgcgcgccgcgggaatcgatgtctaccagatcgaccatgaagacgccaacgggcaattcgaactgaattacaccttcaccgactgcctgacgtcttgcgaccatttcatcttcttcaagatggcggcatcggaaatcgccaacgagctgggcctggtgtgctccttcatgccgaagccgtttgcaaaccgccccggcaacggcatgcatatgcacatgtcgatcggcgatggccagcgcaacctgtttgctgacaagagcgacccgcgcgggctggacctgtcccagctggcctatcacttccttggcgggctgctggcccatgcgccggcgctcacggcgctttgcgcgcccaccgtcaattcctacaagcggctcgtggtgggccgttccctcaccggcgccacctgggctcccgcgtatatcagctatggcgacaacaatcgctcgagcatgatccgcatccccaagggccggctggaactgcggctgcccgatggcgccgccaacccgtatctcgccacagcggccgtgattgcggcggggcttgacggcatcgaccggaagctcgatcccggcgcaccgcgcaacaccaatctctatgagtggagcgaggcgcagctggccgaagccggcatcggcctgctaccccagaaccttggcagcgcgctggatgccctcgaagccgatgcgctgataaccgaggcactgggacccgttgcgcaagagttcctgaagctcaagcgcatggagtggctcgaatatcaacggcatgtctcggactgggaagtgaagcagtacctggaattcttttgaagaaggaatcacgctatgtgcggaattgttgcattgttagtcaagacatcttcgctgcgggaaaagcttggcgagctgatggtgcccatgctgatcggcatgaccgagcgtggcccggattcagcgggattggcggtgttctcggcgcctgtggaagaacgccacaggaagatcagcgtctatgccggctacaccgatgacggcgaacgctatgactggaatcgcctggccgacgcattgaatgcggccctcgacgtgcacgcaaccgtgcaggcacagggaaaccatggcatcgtgaccttccgcggcgagccagagcgcgtcaaggactggatcgccgcgaacgaccccaagctgcatgtgttctcgacgggccgcagcatcgacctctacaaggacatcggcaccccggctgaagtggcagcccgttaccgcttcgccgaactccagggcagccacctcgtcggccatacccgcatggccaccgaatctgccgtcacgcccgatcgcgcacacccgttcaccgccggcgaggacttttgcctggtgcataacggctccctgtcgaatcccaacggcatccggcgcatgctggcgccccatggcatccacttcgacaccgacaacgacaccgaggcggcaacgcgtttcctggaatggcggctgcgcgaaggcgacacgctagagcaggcgctgcaggcaggctttgatgtcctggatggcttctacaccttcctgatgggaacgcccacggaactggcgctgatccgcgaccccttcgcctgcaagcccgcggtagtggccgaaagcgacgactacgtcgccatcgcgtcggaattccgctcgctggcccacctgcccggcgtcaggcacgcccatattttcgaaccagcacccgaggagatgtacgtatggaaagcgtgaagtttgacctcgcggtcacgccgctgcgcgaagtcaaccagtacctgcacaaggacgtgcctgcgcaaggcggcttgcgcgtgcagatcgacaacccgaacggcgcgcacgcgatcgccgccggattgaatgcgcctgtcgacgtggtcatcgaaggccatgccggctactacgccgccgggatgaatcaaggcgccaccgtgaccatcaacggcagcgccggaaccggcgtcgccgagaacatgatgagcggcaaggtccacgtcaagggcttcgcctccaacgccgcaggcgccactgcccacggcgggctgctggtgatcgacggcgatgccggcctgcgttgcgcgatttcgctgaagggcgccgatatcgtcgtcggcggttccgtcggaagcttctcggcgttcatggcgcaagcgggcaacctggtggtgctcggcgacgccggcgaagcgctgggcgactcgctctacgaagccgccatctatgtgcgtggcaaggtgaagagcctgggcgccgattgcgaagagaagaccatgggcccgcgcgaacgcgtggtgctggccggcctgctccaccgcgccggccatgtggatatcgacccgtcgtcgttcaagctgtacgggtctgcccgcacgctctacaacttccatgtcgataacgcaggagcctattgatatgaatgccccgacccaactgcaggacctggcatcaagttccacccagactccaccgcgctattccgcgacgttcgacccggctgccctggccgaaatccggcgcgccgcggccaccggcatctacgatatccgtggcggcggcgccaagcgcaagctgccgcatttcgatgacttgctgttcctgggcgcctcggtcagccgctatccgctggaaggctaccgggagaagtgcggaaccgacgtcgtcctgggaacgcgctacgccaaaaagccgattcacctgaagacgccggtcaccattgccggcatgagcttcggcgcgctgtccgcccaggccaaggaggcactgggacgcggcgccaccatcgccggcacgagcacgaccacgggcgacggaggcatgacaccggaggagcgcggccagtcgcagacgctggtgtaccagtacctgccctcacgctacggcatgaaccccgacgacctgcgcaaggctgacgccatcgaagtagtgatcggacagggcgcgaaacccggtggcggcggcatgctgctgggacagaagatcagcgcgcgcgtggcaaggatgcgatgccttcccgaaggcatcgatcaacgctcggcatgccggcatccggactggaccggccccgacgacctcgagatcaagatcctcgaactgcgggaaattaccgactgggagaaacccatctacgtcaaggttggcgccacccgcccctactatgacgtggccctggcggtcaaagccggcgccgatgtggtggtgctcgatggcatgcagggtggcaccgccgcgacgcaggaagtgttcattgagcacgtgggtatccccatcctcgcggccatccggcccgcggtgaaggcgcttcaggacctgggcatgcatcgcaaggttcagctgatcgtctcgggcggcattcgcaacggcgcggacgtcgccaaggccctcgcccttggagcagatgccgttgccatcggcacggctgcactggtcgcgctgggggacaacgacccgcgccatgccggcgagtaccacaagctcgggaccgttccgggggcttacgacgactggcatgagggcaaggatcccgcaggcattaccacgcaggatccggaactggcttctcgcctggatccggtacaggccgggcggcgcctggcaaactacttgtcggtcatgacgatggaagcgcagatcatcgcgcgtgcctgcggcaagtcgcacctgcataacctggagcccgaagacctcgttgcactgaccatcgaggcggcggcgatgacacaggtgccgcttgccgggaccgcgtgggtgcccgggcaaggtgggtactgagttcaagtggcacccaaaaaagccgcccacgccagttacggccattgggggagctggcgtgggcgcgaagaccaccggatgcggctccagcggcaatacgatgctacgcaaatccgcctgtggcgactgccaacaattgtgtcggcggccgtagcatggcttgcggccgatgctgtgccgctcaggccaccggcaattcgatacggaactccgcccccgccccagccgcactgcgcacgctggccttgccgccatgccgctcggccacggcccgcaccagcaccagccccagacccgtgccttccggcgcgccctgctgcccctcatgcaagcgcgcgaacggttcgaacaatcgtgcctggtcggcctcggcaatccccggcccatggtcctgcacggcaacgacaaagctgcccggctcacgcgtgagcgagaccgtcacggtccccgcttgcgggctgaacttgatcgcattgctgaccaggttggcgatggcgcgcgccagcagtgtcggttcaccctgcagcaccgcgggctcgtcaggcaggtcgatctgcagcgtcacgtcgcgggcattggccagcgcccagagctggtccgtcgcatccagcaccaggccacccaattccacttccatgaacgccagggtcttcgactccgcgcgcgccacgctgatgaagtcgtcggccagcgtcatcgtgcggcgtgcatgggcggcgatgcgtgccagcacgccgctgtccgtggcgacgtcgccggcggctgccccatcgcgccgcgcgcggcgctcatgcagctcgatcaaggccaggatcgatgcctgcggcgagcgcatgtcgtgcgacaggaagcgcagcatctgctcgcgctggcgctcggcaatgcggatcgcggtgatgtcgatcacgctgacgatcaggccggccacggcgccggcctcggcgtgcagcggcgcgccatgcagcaggtagcggcggtcgccgcgcccggccacctcgatgccgccgtcgggaaccgggaccggagcgatgcgggcgccggcgtggcggtcgtgcagcgactgccagtacgccagggccggtgccggcgcgggaaagattgcctcgatcagcgcgcggatggcggcccgcggcggcccggccgcgcccggcgcatgagcgggctcgccgtccagcaccgcgggcgccagcgccacgcagcgccggttggccagcatcacgccgccatccaggtcgcagatcgcggtggcatcgggcaggctttccaggccatcggacaggaagcggcgcgtgccgcgcagttgcgcgctcatgctgtagacggcgcgcatgcggctgtcgagcgtggcgccggtatggtgcggcgcggcaatcaggccgggttcgcgttccagccgcgccagttcgtcggtaaggaagcgcaaggccgcctcctggcgcaaccagctccacagcgggtagaacagcacgcagcccagcgccgcggcggcgggtgcaaaccatagccgcgccagcgccagcagcaacagcgagcctcccagcagggccgccagcagcagcccggtggccaccagcgcgccgcgcgggggcaggcgcagcgcggccagtgcggccagcagcaccgccagcagcgtgccgccgacctgccacgcgcgcggcaccgccacaatcgcatcgccgtcggtcagcgcctgcacggtattggccaggatctccaccccgctcatgccgcggccatcgcgcgacaccggcgtcggcagcacgtcgcccatgccggtggcgagcgcgccgatcagcacggccttgccggcaaagatggcggggttggcgcggccatccagcacgtcgcgcgctgacacgcgggcaaaggtgccgggcgggccggcatacgggatacgcaggcggccgctgcgctcccagccgttggcttcggtgatccgggccggctcctggcgcgcgatgccgggcggctcggcggcgcgaccgaacgccgccatcaccgcggccaggtgcggcacgccggcggcggccaccggatggggcccttcgctcagatagacctggcgcgccacgccatcggtatcgaccaccatgttgatatggcccaccgcggtgcccagcccggccagcgggtagcgcaccagcatgccggcggggccggattcggccaccaccggcagcaccacgttgccggcccgggccaggctgcgggccagcacggcgtcgtcttgcggatagcgggtgtcgcgctcggacaggatcacgtccacgccgatcacgcgcggcccgccggcggcgatgcgctcgaccagctgcgccagcaccgcgcggcgccacggccagcggccgatggcggtgatgctggcgtcatcgatgccgacgatgacgatgtcgtcgcgggccggatggtgctgggcgctgatggcgatgtcgtaggcggccaggtcggcgcgctcggcccagccctggcgcgcggccagcaccaccagggccagcacggcagcaagcagcaggcaccattcgatcagcgtgcgctgcccgaaagcgtgcccgggcgcggccggcgccgggcctggcgcgtcagttgagccggatgcggccaccaccgtccggccggtcgcccgacccgattgcgccgccctgcgagtcgcgcaggagggcattgacttcaatgcgctgcggcgcggagaacgccgccgggtcaggtgtcacccccggcgccgcacgtgccacgcggatgaaatagacgccgggcgcggggcgcggcaggtcaatggcattggtggtggtgtgctcgtcggccagcagtgtggcaaagccggcatcggccgacacctggacccggtagcccgcgccggcgccgctgccctcgggccagccgatatgcagcgcgccgccgtcgtcctgcagggtcggcacgggcggcttgggttcgacgctgaacgggaccgcgtccgaccacgggcccggccggcccgccgcatcgacgctgcgcacgcgccaccaccagcggcccggcaccagcgcttgcgtggcggcgggctcggaggccgcctgcaccacggcatcgcgcgtaaaggccgaatcggcggccagcgccagttcgtagcgcgccgcgctcggcacggtggcccattcgaaggcgacggcttcggcatagcgcaccgcatcggcggcaggctgctgcgtgaacggcgccggcgggttcagccgcaccgacaccggtgcctgggcgtcatggccggtcagctggtgcttgtcgatggcactgacgctcaggtacagcgtgccctcgggcaggccgtcgacgcgcgcggtcgtggcagtggcgccactggcggtgccggtccagaccagttcgctcagcgccgcatcgcgcgccaccagcacgcggtaggcggtggcgcccggcaccggctgccagacggcttcgaaggacgggcccagcacggtatcggccgggggcagcagggccggcgccggcagcagcgccaccggctgcgacagcttgccgccggccgacacgccgatgccatagccggcaccgaccgaagccgccgcggtcatggcacgctctgctgccggcctggcgcgggcaccccgcgccgcactgacgccgacgcgcccttccagcacctcgctgcggcttcctgccgtgtcggccgagacccggtagcgggtgccgcgcacgccggtcaccatcatcggcgtatgcagctcgaagcgcccgacgccgccgccctgcggtgccacgcgcgtatcggcggcacccttctcgatgcggatcacggtgtcggtcaggccgctgcgcgcgaacatgcgcagccggctgaccgagagcgtggtggccggcggcaccgtgacgcggctgcggtccggcaactccagcgtgaccgagccgcccgcgggggtctcgatgcgcgtggtttcgtccagcgtcatgccggcctgcaccggccggccattggcgcggaccgcaccggccacatggaccacacgcgccgacgcggcctgctcgggaatctggctgagcgggatgcgcaggcgcgagccgggcaccagccggtacggatcggccacgccgttcaggcgctgcagcgtgcgccacccctgctcggacgccatgtagcgcgaggccaggccgatcagcgtatcgcccggctccaccaggtagataaaatcggcgccttccgcgcccgcgggcccggcgtgcgccggaaccgccatgccggccagcagggccagcgcggcaccaccgatcaccttacgcatccgccccggcctcatccgcctccacatctgccgcggaagcctcttcaaagcgatagccgtgcgagtacacggaggtcagccgcacgccgttctcggggcgcagcgccagcttgaggcgcagccgcgagatatgcgtatccagcgtgcgcgagcccgcgcccatggcgcggccccagacggcctgctccatcacctcgcgcgccagcaggcgcccggtattgcggaacaggaacagggccagctcatattctcgcggggacagcagcgccggctcgccgccgacggtgatggtgcgcgcgtgggtatcgacgatgtagttgccgcgccggatcagctccacttcctgcgccgcctcggggtaggcgcggcgcagcagcgaacgcacgcgggcgatcagctcgccggcgcggatgggcttgagcatgtagtcgtcggcgcccacggtgaggccgtcgacgatgtcggattcggcggtgcggctggtgacgaacaggatcggcggcatattgccggacttctgccgcacccagctgaccagctcatagccgctggtgcccggcaactgccagtcgaccagcaacaggtcataggcgcgctcgcgcagcgcgcgcagaaagtccgcaccgttggcgaaggactcgcactcgaagccggcttcgctcaatatctgccggatcagttcggcctgatccggatcatcctccacggaggcaattcgcatacctctacatccttctgccagcttccgactgcaactgcggtctctgccacggcatgtcgacggctcggccggcaagtcattcctcatattcacccccaggggggcgcggccgtcgatctgatccgacgggccaggccgaagcccgccggctgccgccatgttacccaatcgcaggcccttccgtcgagatgccccgacgaggggtggtggcggcaactgcgccgatccctccgcgatcgtctttcgatctgcatcatccttgccgccatcgcgccgcccggggagccggccggcgcggccccggcagggcctattgcagcatgtaggtctcgtactccagccggtccagcttgcggtccagcaggtacagcgccagcgccaccaccaccagcagcgacaccgcaaagccgtagccgtaccaggccggccccaggtgcagcgtcagcagcgtcagcgcgaagttcagcaccacgaaggtcgcggtcagcagcagcacctcgcggcggcggtccaggtagaagtagatgttgagcacccccagcagcaccacctgcaggctggcgccgatcacgtccacgtacagcagcggcaggtacagctcggaaatgcccagcagccgcagcacccacacgcccaccgcgaacagcagcagcgcggcgatggcctgcaccttgacgatctcgtacaaacccagccggatggtctggaccatggtgttgcgcatgtcctcgatatgctcgagcgagctgccgccgcgcaccgcgttgtagaacgcgtcgtagtactcgacgaaatcggtctcgatgcgcaccaggaacaccgccatgcccgggatgattgccaggtaggccaggaacaccgggatgtcgtagatgatcgacgcatgcagcggcccgatcacctgctgcccggtggagggcgcgtaccagaacatgaacttgtcgatccagatacccaggttgtagagcaggccgatcgcgaccaggctggggtaggcatggcggcgctggaacacctcgaacgacatgaactggcggctggtgtagttgcggtagatcagcgtcaccatgccggtcagcaggcacagctggccggcggcgaaaccgcccagcagcccttccagcccgtggccgcgcagcaccagcgcggcgccgaccgagatcgcgtagcccagcaggaaggtccacacgatggccttgtactgcttcatgctcgacaggaagatcgcagcaatccagatattgctcagcaccacgaagcccgccaccatcagcagccggtacagcaccgactgctcgccgaagctgaataccgcgcacgccacgccgatgccgcccgacagcaccgtcgccagcagcgccaccgcgtggtagttgctcaggaccaggtggtcgcgcttctcgaacaaccggtccgaggtgaagcgcgtgaacgccagctgcatcggcccggtcaggatcaggctgccggcgatcaggtaggtcaccgacacctggaactgcgtgatcagcgagcccggcaccacgaagggcaggctcagcatgccgatcagcaggatgccgacgatggacaggatccatggcccggagctgatgatgccggcatacgcgtaggcgctcagcatgcccgacaggttgtcccgccgcagcatcttgcgcagctcgaatccaatgccagccatgctcaggcccctccgtggaccgggcagcgcgcggggttgccgccgccctgccgctcaggttcgccatgcccggcgccgtctgcctgcgccatcagccgttgatacagttcgcggtagctgcccaccatgcggtcctgggtgtagtagcgctccacgcgcgccacgccggcggcctgggccgcctgccagcgcgccgggtcccgcagcagcccgagcgccgccgcggccagggccgcggggtcggcaatgcgcaccacctcgccggccgagcccagcgcggcgtcgtcgccgggcaggccgaacagcagctcgcggcacgagcccacgtcggtggtcacgcacggcacgccggcggcaaagccttccagcaccaccagcggcagcgcctcgctgatcgagctcagcaccagcacgcccacctgcggcagcagcgcgtcgatgcgctggaagcccaggaacttgaccttctggcccaagcccaggctctcggccaggctgcggcattcacgcgcgtagtcgggatcctcgtcctcggggccggcgatccagccttcggcgtcggggtactcgcgcaccaccgtcagcatggcgcggataaaggtcttgacgtccttgatcggcaccacccggccaatcaggcacagcaccggcggcacgcccggcttgcggcgggcgcgcagcggcgccaggcgcggcaggtcgatgccattggggatgctgcgcgtgcgcacctcaggcgcgccgtcctgcacctggcggcggcgattgccctcatacagcgcgacgatgtcgtcgccggcgtcgtagcagacccggccgatggtctcgaagaagcgcacccacagttcgcggaagtagctgatctgggagatgtcgcgctcgaacacattgcggttgtcgcggatccactggctctggaacaggtcgatcttgcgttccttggtgtagatgccgtgctccgacaccagcagcgggcgctggttgcggtggcgcagcagcgccccgagaaagcccgcatagccggtggaaaccgtgtggtagacgcgcgccgggatcaggttgtcggcaatgcgcaccagctgccacagcggcttgtgcatgatgcgcacggtccagaaatagtccgtgaacgacgggtccgtgcagaagcgccggtattgctcggtgatggtctgccaggcgcggcggctgtacaggaaggcgtcctcgcccagcgccccaccctcgcgcagcgccggcatcagctcgcgcatcatggcgccggcctcggcctcacggcccgggtcgcgcagcagctcgtgcaggcggtccgaggcgtcgaacgccttggcatcgccggtgctgccctggaccagcggcggcggcgggaagtcgtacaggtagtgcgtttccaggtgcaccacgttgggcggcagctggtaggccatgtcgccatagtcctcgcgccggctgccgataaagacgatgccgaagcgcaggtccgggaacgcgcggatcatctggttgacccagctcgacacccctccgctcacatacgggaaggtgccttcgagcagcaacatgacgtcggccgacgtcgcttttaccaggatcttgctcatgattgccagtaccgcagcaggggccgcaccagcgggagcggcgaggggctgtcaaacgatgccatcagctggcgcaccgcggcatagtcgcgttccaggtaggcggcctcggccaggtgcggcagcacgcgttcgcgcgcgaagccgagggattcggcgcgctgcagccattcacgcgcctcgcgcggggcattgcgcgccagcgccaggcgtccgcgcatgtaccacagcgaggcattgctgtcgtcgtactgcagcgccgcgctggcgtagcgctcgacctggctggcggtgtagcggtagacgtcgccctgcaccaggttctggtagatcagttcccagtacaggtctgccagccgcttgctgatctcggcgcgctcgctggcgctgttggcgctctccagccgcggcagctcggccaggatctgctgggtcagctgcttctcggcgccgtccagcatgccgtaggccagcagccgcacgtcgtcgacgctgtcggccagcagttcgcgcagcaccgggctggcggtgcgcgccggcatcgactgcatcgccaccagcgcggtcatgcgctcgggcaggggcgcgcgcgcattgcccagctgcgcacgcaggcgcgcgccgccgccgtgggtgacgcgcgacatcaggtgcgtgacgaactcgggcaagcccacggtgccgatgccgctggtgtccacgcgccgcgggaacagcttcgagaacaggtagctgcccaggcacaccagcgcgccgcccagcggcacgaagaagcagaacagcgcgagaaagccatagctccatccgaacggcacgcgaaagcgccgcggcagcaggcgccacagcagcagcgccgtcagcgcggcggccaccgcctgcatgccgaagaaggccagcagcagcgcggtgctgttgccggcgcgcgccagcagcgccagcgcggcgatctgggcgacgagcccgctggcgccgagcttaaacatggggcgcttccccggccggcagcgtggccggcgcgatcgcgccatccacctgggcccggcgcagcagcttgaccagcgcgtcttccgagccggcgccgggcaccgccagcgtatagacgccgatgcccgcactggtgaagtcggtgccgaactgcgcgcgcagcatgtcttcgatgcgcaccaggtaggccgccaccgcctgcgcatcggacagcggcatcagcgtcagcatcgcgcggtgatgggcgttgaccaccggccacgccacatccagcgcgcgccggctgcgcaccacctgctcgaacagcgcatcgcgctccggatccgcgtcgaacaccagcgccacaaccgagctttcgatgccggtctcgcgccgcagccgcgacagccgcgcatagtccagcgcaaacgggtatgggcaggccggcagcgccgcctggatggtgcgggtggcgccggcgtgctccacgccgtcggcgtagtagcccagcagcaccatcagcatctgcaggttctcgtaggtcagcgacaggaacggcatgcgctcgaccaccagcaggccgatcaggtggtcggagccggccagcaccggcgccaccgccacgtagcgcgtctgcgcgccatgctgcaggccgtcggcgctcaggtgcgccagctggcgcgtgtccaggcagtggcgcaccaacgggtcggtggtgtcgagcgtgaattccgggccgatgctggcgaccgggacgccatccacgtgctcgccatcgcaggcatggagcgcggctgcctcaagctggcaggcctgcgccaccacctgcagcatcggctgcgcaccggccagcacctggccggtgcgcgcggcctcgtccagcgccacgctgcgcagctgcgacagcgtgtcgcgcagcgtggtgggccgcgccagcaggtcgttttccagccgctcatgcgagatgcgcagcaggtagtggttcttggtcagcgccgccaggcgttcgtccaggtagcggttcacggcgcgggcgcgcgccaggcgcgtgccccagatatcgccgaactgtccggccaccagcaccagcagcagcccgccgaggaagaacaggcgcgggaagggccctgccatcacgccggtctgctggtagaagtaccagccgcccagcagcatcagcacgctgcccacgccgatcagcgtgccatagcgcagcgccaggatcaccggcagcagccaggcccacggaaagcccatgccgagcagcagcggattctgcggcagcaccagccacgccagccccattgcggccagcatggccaccaccagttccaccacggccgcgcgcccgctgaccgccggcgccagcaggcgcgcatagcgcccacccaggccgatgccctgtccttgccgcgcgcgatatgtcttgtcagccgtattggccacgctcatccccttgcttcaaccattgcatcgccgcatcggtgtgcagcctcttcctggtggcttgccgccgcctcagccttgcatcagcggcgccagcaggcgacgcagcagcttctgcgcggtgcccgacagcgaggcgcggctccagccgctgtcgctgccggtggccgaccacaccacttcaccgctgttcacgtccagcagctgcagcgagatgccgaccgcaggctcgccgtccacgcccaccttgtagcgccattcctgcaccgcgccggtcagcgcgtaacgggccttctcggcacgcgcccattccagcgccttgcccacggcttcgcgctcggccggctcgaacagcgtttccgggttcaggctggccggataacgcttcaggctggccacgccgccggtcttcagcaggctctcggcaatcgcctcggcgcgcaggccggcctgcggcgtctcggtgtagttcacgatcggcagcaccgcgatgatctcgccgcgggccagcgccggcgcgcggccgacatccgtcaccgcacagcctgccagccacagtgccgcgcccagcgcgccgcaccatgccgccagccgcctggccactgtcttgcccgtcattgccgtggtttgcttgttcatcttcatccccttttccatgtcctgttgttacccgatccctgccatccgctgccgccggctcagtacagccagcgatagcgcattcccagttccgtcagcggcctgccaccgttgcgcgccgcggtctcatgcgagatatacagcgccaggtggtcgttgccgaataccgatccggccaccccgccctgcacgcggaagttctgccgtgcgcgcgtgtcgcgcagcagccccacttcaccgaacggccgccacttgcgtgtgtattcgtccagcagctcagtgccgaagccgaacagcacgccggcctgcgtgaagccctgcggcatgtagaacgccggcgtggcttcgtcgccgaccggcaccagcgacgccatgcgcggcgtcaggccgccgccgttggcactgtagttggcatgcgtgccgaccacgcgcacggtgtagtccggatacgaggtgcggatcctgtagccggcctcgacgtcatagaccatgccatgcccgagcgcgctgcggtcctgcccgcggaagctgctgtactcgatgcgcgcgccgacgaactcgcgcaggctgaagcgccaggttgcgcccagccccacgacgtccttggccccgcccacgcgcagcggcgccgattcgtcggccggctggttcagcccggccagcgtgctgaactgcagccggccctgctggttccactcgccgaagaagcgcgcggtcgccattgtgtccagcccctcgcggtagcctgccgtggcacgccagcgcttgctgttgtcgcgataacccagcgacaggtcggcgcgccggtcggacgacggcacgttcaccagctgctgcggatcggtgctgcgctggtcgcgccaggtgccgcgcaggttcaggtcatacccgtcccacaggcgcacgccacccgcgaggctgccttcggtatattccagcggcttctggtgcatgaagctcacgcgcggctcgatcgcctgggcgttgtagagcagcgtctcctgcaaggagtcctgcagcgtgtcatcggaacgggcccgctcctgggtttcgaaggccagcgtctgcgcggcgctgatgcggttcagttgctggttggcctcgatctggttggccaccggcacgcggccggcctggcgctccaggatacggtcaaggctgttcatgtcctgccggtccagcgcgatcgccacctcggcataggccggtcgctgcagccggttgacgtactggcgggccagccagcttcgcgccagttcgttggattccgcggacatcgcccatgccagcgcggcatcgcgcccggcagcggacagcgcggcatcgcggcgggccgcattgcgcgcgacctccgcggacgcgggcgcggttgccgcctcatgaagcggcggcagcccggccacctcgcccagctgcgacggcgcgcccgccatcggcggcaccagttcgcgcgccgccgtggaagcgcggtccgcgcgcagcatctggatcaccagcgcgcgcgagacatcgcccgaggcaaagatctgccccagcgccacggtctggcggcgcaggtccgcgcgcgaaggcgcgccggactcgttctcgtactcttcgtcgccgtcggtgttgtcgggccgcagccgggcatagcgcaccccgccctgggaccagccatggtgcaggtcgatccaggcctggcggcgcacgcgccaggccatgtcggtctggccgatggcttcataagcatcggccatcaggctgagccagagcggatcggcgctcttgccgtcgttgagcttgcgcaggtagtgcatggccgcgcgcccgtcctggaaacgcatatggcccgcggcgaaggcgccccacaggtcggggttgtcttccgcgtcgtccttgacgcggcgcatcaccgcgcgcacttcggtatcgctgccctggtcgaccagcgtccacagcagcgccgccagcgtttcgctgtcggcatcgcgcaggcccgcggcgcggcgcaggtcggccagggcgtggtcgcgctggccggtcacgcggtagtactccgcgcgccgcatcaggaagcggctcgactgcgctgccgcctggcgctgctcgggcgtcatgtcctgcaacaggcgcccgatacgccggtaggcgtgggcacgcgtgtagtagtacagcgccagttccagcgattccggcttgccgccgcggcgccagtcggcctcggcgatgcgcccggcgtcgatcggggtcttgtcgtagtaggcgatcaggttggagaaatccgcctcctgcgtgtcgcggacctcgtccaggcagtcgttgcgcgccgggcccgccggcctctccatgcagtgctcgtcctgcgtctgcgccgccgccagcatcagctggcgatagccgtccttgagcaggtcgtcgcgctggttcagccgcgccagctcggtaaaggtgcgccagtagaggatgtcatccttcccggccgtggcacgcgccggcagcatggcgtccagcgcctgcgccagcttgccgcgcacatagagcaggttggcgagcttcagcgcataggcggggcgcgggccgaagcgctgctgcatctgcgtatagatctggaacgcgcgctcgtccttgccggcgcgctcggccagcgcggcgtggcgttccatgatgtcgcgagccctggggccgtggctcaggccttcgaggaagcgcatggcctcttccggctcgcccaggcgttcgtaggcagccaccacctcgtccacggtcttcaggtccgagccgcccgcgcggtggcgcagcgcggccaggtaggcgcgatcgtcggacaggcccggggcgagccgcatcactgcatcccacgcgcgctcgtcgttggtggcgcgggcatagtcgagccagctcttcagggccacggccggctggcggttccattcggccacctgcgccagccgttcgcgccagatcgcctcgcccggcagccggcgcaccgcggtctcggccacgcgctgcgcctggtcgagcttgccggctgacaggaacacgcgataggcgagttcgtagtcgtcggcgttgaacggcttgtcggctggctccgccggcgcctgcgcgggcgcagcagcttgcgccgcaatcttgcgcgtacccagctggccggaggcggccagcgcttcacgcaaggccaggccgcgcggcccgtcgaggaagaccaggccgcgctcggcccacggctggctggcggcgatacgccgcgcctcggcctggcgtgcggccagcgccgccgggccggcatcgcgcgtgcgcgccgaaaccttcagcagccgctcgacatagcggctggcctgctccggcttgttggccgccagcgccagcttcgtcaggtagcgcagcacctccggatcgtccagcagcttgccgccgtggcgctcggcctgcgccagcgcttcgtccagcaggttgcctgactgcagcgtctgcaccgccttcaggaacagcgcgcgccgctcggccagcgtggtggcggccgcctgctgcgcgaacaaggcgttggcggcgttgcgatagtcgccgcccgcgatcgccatgtcggccagctggcggttccagaaggccgcgttgttgcggtcctggctggccagcgccgcatagaacttgcgcatcgcgtcctgggcgccggcctggcgcgactgcgtggccagcgtttgcaggtcggccagcccccagctgcgcccggcagcctggtccagcaggctgcgcagctgcaccaggttctgttcgcgctcaggcgtatccggcagcgcggcccaggcgcgctgctgcgcgatctcgatgcgcgtgcgcaggatctggcccgacaggtcggtgccctgcaccgcctgcatgcgcgccagcatggcctgcgcctcttccagccggccggtgcgcgcgtattgttcggccagcacgcccatgaaaccggggtcgtcgggcgtgaccttccaccaggcttccaggtaggccatggtcagcccgtcgatggtgcggccctggcccagcaggcgctcgcgcagagtctcgcgcgggaacatcagcgccaggccgatccccaccatcgcagtgaaagtcagcaccagcgccggcggcagcagccgctcgcgctcaaccggcgcagcggacttcgacttgttgcctggcatggttcggatcggtgacgggtgcggtatccacgcgcagcgtgttgcgctcgcggacggcctgtacgggcttgccatcgacgctcacacggcagttgccggcgttggcaagacggaagaatggcttgaagtagccgctgaaggcgaagcgcgtgacgccatcgcgctgcgaccattcgcgtacgatgccgttggcttcggccagctgcggcgcggccggggcggtgactgtgtcgcgcacggcgaagcgcgcatcgccgccatccaggtgcaggtagacgccgccgcccggtgccggcgaggtgccggtcacgccgtgcgccgcgcccacgtcgggcatgcccgcgccgctccagcgcaggttgcgcaggttgccgtcgccgcgcacgatccattcagcaccggtgccgcccggctggccgtcgcccacatcccgcgccacggccatgtcctgccagtcgagcaccttgcgcacgtagtcggtggagtgcagcggcagcagcggctgcgccagcacatagtcatagaccttgcgcagcgccttcagcgacgcggccttggtgcccgaatagctgtggtagtagatattgaccggcttgaagcgataaggcttgtcggtcagctcgtaggtctcgatcacgcgctcgaagccgtagaacgggccgtgccagaggttggtgtagacgttctcgttctggttgggcgcaaacacctggaaggtgccgccgggcttgttgatgcctagcggcgcgatcgcgatccagctcgggttgctgcgcgtgatcagcgtatcgccgccgttcatgttgagcacgcgcgccttctcggtgagccgcagcgcctcggccggcggctggcagtcgcccgaccacagcagcatgctgaccggcttgccggccggcgccagcgtgcggttgatgtagtcgatggagccgccgatctcgcggttcaggtccatgctgtagccggggatgctcaggtggaaggcctcgtcgccctcgaccaccgcggcgccgctggattgcgttggctgccctggctgggccggcacggtgcgcgaccactcgaacggatgcgagaaggtatggctggccacctcgacatagggctgcgcgaagatcttgcgcgcgatcggctcaagctcggcgctgagcctggggtacatgccgtccttgctgacttcgccctggatcaccgacatcgtcatcggcagccggtagcggtcgaagatctcgcggaacagcacctcgccggagaagccgccgccgggaatctcggcgcgcgaggcaaagccgtcgccgtcgatatggatggtcagcaggcgccggccgttctcggtggtgacatcgggcacgggcatggcgggcaggcgcagcgccgcgcgcaggaagtccagcggctgcaccacccagcggctctggccgttgccgttgccgctctggcgcaccgcatacggccccagcacatagccgccccacggcgtgatcgcggcggcgtcataggtcagcgtgcccgaacgcaggcgcagcagcgaacggtagccggcgccgtccggcacctggatcgcttcggcctgggtgcggtcgggggccaccggcatctcgaagcccatcatccggtccttggccagcacctcgaccgggcccgacacgcggcccttgactgccttcagcccgaagctgcgcgccaccgtgccgctcacgctggtgccgaagtcgttgaggaacaccaccggcatgccctgcgccatgcgcgcctgcacccaggcatggaagcgtcccggctgcgccgtgacattgcctgacaggtacaccaccacgccggcgtagcggtccggcccgatctcgggcaggtcctcgctggtctcggcgaaatccacgcgatagccaaggtagttgagcggcatcgagacaaagcgcacaccctcggaatcatcgatcgacaccccggggcggcgctcctgcactaccagcacgcgccggggcagcacctcgaccttgccgatgccgaccgtctgcagcccgggatcggccacatagggcgtgatccccagcgcgcggatgcgctgcgcggtttcgcgtgcgcagcggcggtccgccggcggacaataatcgatcgagatcaccggcaggcggtattgctcgcggatggtgcgcgcctgcgccagcagccagtcgcggtcagcctgcgcaacgtcgacatagcggccctgggcctggttccagccgcggaacagcgactcgaaggcaacggcataggccaggtcatgcacctgcggcaggatctcgaagccgcggttgaagaccaggcgcgcctcggggtagcgcgccttgatcgcgcggatcacgcgcaccagccccgcttcctgccgtgcgcgctcggcgtcggtcctggcggcaagctggtaggaatcgagggtatcgaggaaaaagccacggaagccgcgctgccacagcggcgcgatcaccttgtcgacatagaaggcgggccagccgtcggctgcctggtcgatgaccggcgcgttccaggcgtcattgcgcccgacgaaccaggccttggggatgtccttgaagtaggcgcggctctccagcacctcgcccacgctgacataggcaaaccaggccgtggccggcgtcgccgcctggcgcgggtcgaagccgctgtcgggctcgaccacggcgatgtcgaaggcttgcagagcgtcaaccggcggcttggcgccgtagtgcaaggcgatcgacggcatggatggcgcctgcgccgcgggcgccggcgcggccgcagccgtcgccgccccgagggccagcgccagcgcgatgccttgcacccgctgcgccatgcgcatccctacccaccccgatcggaacggcatgcggccgccccggttcccttgtgcttcctccagctgcttcacaggcttacttcctcttgtctgcgcacgccggcaagtgcctcacgcacgacattccctgaggcggtcgctgccgccttgtgtccgactgtggatctcagaatcggaaaaatctgatggtatccggaaacgaatgctaggacagacgcatggatcacattgtcaacaattgtcccaacactgagacattgagccggctcgcgcgttaacgcgcgccaccgtgctgcgggcgcacgtcagccgcgcttgcggtacggcgggcgcggctcggctcggctcggctcaaatgcaaacaacgaaaacagtccaggtcccgtgcgcgacgggtggtggggctgtccgcaaccgaaattccggacagctaggtttgaaacgccatgatggattccccgttccgagcttttatgtatgggcccgcatacagtgggcgcgctcatgtatgtctgtgcacgacgcgagcgcggccaccggcctggcctttattgtcagcataatgatatatccgggccgcgccggcttcccccgaacgcggtagggattgggtgccgtaagaatttgtaaaaaagatggcacgcccatgcaccggacgaccgccattatgcacggcggtgtggcatcgcgctcgctggcggtgcacgcacaaccaaacccgcgataaaaaaatcagggaattcactgaactgaagctgaagtagaaaacgctaatatctcctatcggaacctctcatcatgattaggcgcttagcctgattgacacgccgggaaaattcggcagaatgattcccacttgtgcagcgcccatgcggtgtgtcttttggtgttgtcgttccgtgacgttttcggttgtcacgacagcgacatatcgaagtcatatggaatgcgctggcggggaacataaaaaggatccgctgggtgcgttgcacacggtgtataacgagcgttttcgctcattttgaaattcaaggttgagatagatatggaaaccggtaccgttaagtggttcaacgacgccaagggcttcggcttcatcacgccggatgaaggcggcaacgatctgttcgcgcacttctccgcaatcgaaggcaatggcttcaagtcgttgaaggaaggccagaaggtacgctacgtcaaggccatgggccagaagggcgagcaagccaccaagattcaggccctctgataccggtggattccgggccggtccagcggaccggccggaaggaaagccccgcagcttcggcgcggggctttttttattggcgcgccggcaccggggccgccgctgcggcagtcttgcgacgagtgaaattgctataatctgccgacccacaaccgccctcccgccagtgggcgcgcacggatgctgcgcgatcagtgcgggacggtatgcagcgtgtcgaggagttacgtggccggtactcaaatcgcaacgcaagacacccctgtcgccgccgaccatggcagccaggcgggcccggcggcctcggccggcagttccttccatgccgcgctgcgcatcctgccgccagcgcagcgccaggccatgttcgagatctatgcgttctgccgcgcggtcgacgacatcgccgacggcaacgcaccgcgcgccgagcgccttgccgcactcgatgcctggcgccacgacatcgccgcctgctacaccggcaatccgcctcgcgccctgcagccgctgagcgcgcagatccgcgccttcgacctgcagcagcaggatttcctcgccgtgatcgacggcatgaccatggacgtggtgcaggacatccgcgcccccgacgcggccaccctcgacctgtattgcgatcgcgtcgccagcgctgtcggccggctggcggtgcgcgtgttcggcctggaagaagcgtgcggcatcgcgctcgcgcaccacctgggccgcgcactgcagctgaccaatatcctgcgcgatatcgacgaagacgctgccatcggccggctctacctgccggcggaagcgctggccgcggccggcatcggcgcggacacgccccaggccgtggtggcccaccccgccgtcggccaggcctgcgcggccgtggcgcgcgaggcccaggcgcactacgaccaggcctacgccatcatggcgcgctgcccgtcgcggcaggtgcgctcgccgcgcatcatggccgaggtctaccaccgcatcctggcgcggctgcgcacgcagggctggcgcgcgccgcgccagcgcgtgcgcctgccgcgcgcccaattgctctggatcttgctgcgccacgccattggctgagcgctgcccccgatgcatgccgggcgcggccgcgccgtgcgccggcacaaggagtctgcatgtcgatgaacgagaccgcctttgccacggcagtgccacggattgcgccggccagcgcgggggacagccccgcgccgcgcgacgccgcgcaggcattggaccagggcatcggccgcgcgatcgacgcgctgctgcaccagcagcgccccgacggccactgggtctacgaactggaagccgacgccaccattcccgccgaatacgtgctgatggtgcactacctcggcgaagccccggacctggagcttgaagcccgcctggcccgctacctgcgccgcatccagaatcccgatggcggctggccgctgttccatgaaggccgctccgacgtcagcgccagcgtaaaggcctatttcgcgctgaagatggccggcgacgacccccaggccgcgcatatgcagcgcgcgcgccgggccgtccacgcgctgggcggcgccgaggccagcaatgtattcacgcgcacgctgctggccctgtacggcgtgatgccatggttggcggtgccgatgatgccggtcgagatcatgctgctgccgcagtggtttccgttccacctgtccaaggtctcgtactgggcgcgcacggtgatcgtgccgctgctggtgctgaacagcctgcgcccgcaggcgcgcaacccgcgcggggtcggcatcaatgagctgttcgtcggcaactgccatacggtggggctgccgccgcgcgcggcgcaccagcacgccggctggtacacggtgttccgcggcctggacgcgctgctgcgcgtggccgagccgctcgtcccgcgcacgctgcgccggcgcgccattgccgcggcgcaggccttcgtgcgcgagcggctcaacggcgaggacggcctgggcgccatcttcccggcaatggccaacagcgtgatgatgttcgacgtgctgggcgtgccgcccgacgatccggcacgcgcgctggcgcggcaatccgtcgagcggctgctggtcgagcacggcgacgaagcctattgccagccctgcctgtcgccggtgtgggataccgcgctggccgcgcacgcgctgctggaaaccggcgaggcacgcgcgacggccgcggccgggcgcggcctggactggctcaggccgctgcaagtgctggacgtgcgcggcgactgggccgtgcgccgccccctggtgcgccccggcggctgggccttccagtacgccaatgcctattacccggacgtggacgacaccgccgtggtggccgccgcgatgaaccgctacatgcgcgcgcacgatgtgccgggccgctatgacgaagccgtggcgcgcgccgccgagtggatcgtcggcatgcagggcggcgacggcggctggggcgcgttcgagcccgagaacacgcatctctacctgaacaacatcccctttgccgaccatggcgcgctgctggacccgcccaccgcggacgtatccgcgcgctgcctgtcgatgctgtgccagatcggcgccacgccgggcaagagcgaacccgccgcgcgcgccctgcgctacctgctggccgagcagatgcccgacggcagctggtttggccgctggggcaccaactatatctatggcacctggagcgcgctgtgcgcgctgaacgcaacgggcctggcaccggaagcccccgagatgcgccgcgccgtggcgtggctcgagcagatccagaacgccgacggcggctggggcgaggacggcagcagctaccggctcgactaccgcggctacgagcccgcgccgagcgtggcctcgcagaccgcgtgggcgctgctggcgctgatggcagccggcgccgcgcagcatgccgcggtggcgcgcggcatcgactacctgctgcgcacgcagcaatccggcggcctgtggcatgagccgcgcttcaccgccgtgggctttccgcgcgtgttctacctgcgctatcacggctatgcacgctacttcccgctgtgggcgctggcgcgctaccgcaacctgcagcgcggcggcgcgcaccaggtgccgtgggggctgtgacggcaccgttcgtgctggtcgtcaccggcatggcgttcgaggcgcgcaccgccgccggtccgcattgccgcgtggtgcacggcctgcgcggacttgcactggaacaaggcgtttccgcgatggcaagccggcactgcatgggcatcctcagctttggcgtggcgggcgggctggatcccgcgctggcgccgggcgccctcgtgctggcggactcggtatgcgcggccggcgaacgctacgacaccgacatgacctggacccgggcgatgcacgcggcgctgccgcatgccagggtcgggatacttgccggcgcggaccagccggtgctttcggttgccgccaagcagatgctgcaccgggccacgggggcgctctgcgtcgacatggaatcgcacctcgccgcgcgcatggcggcggcttgccggctgccgttcgcggcctgccgcgtggtgatcgacccggccagccgcgcggttccggctgccgcggcggcaggcatgggtgaagacggcaagacggatgtcggcgcggtgctgggcgggctcttgcgcgcgccgtgggaactgccggcgctgatgcggctggcgggcgatgcggcggccgcgcgcggcgcgctgcgggcggcacggctggcgctgggggatgaatacggcttgcgcgatatgcggacgcaggccggctgacgtctgagctggccgctgggctgctcagacgccagcctgcccctcacccaaacttcctcaccgcatccagcgccagcccgctgccgatgctgccgaaccggtccccttccacgcaacgcgcttgcggcaacagcgccgccagccgctgccgcagcagcggcacgctgctggagccgccggtgaaaaagatggtatcgaccgcggcgccatcgacgctagcatccaccagcagcttctgcacggtctgctcggtcttcaccaccagcttgtcgatcgacgcatcgaactcgtcgcgcgtgatggtcagcgtcagccactgctccagccggtgcaggtccacgtcggtgctgccggcgtcggacaaggcgatcttggcggcttccacctggatcgccagccagtgcccggcgcgctcgcggatcagccgcaccaggcggtcgagcttcaccgtatcggccgcgtcgcggtagttgtccatcaccatcgaccacgccttgcgcgtatagaccagattgatggtgtgccagctggccaggtcgaaatactggctggacggcatcgccttgccgttgcgcagcgcgctgcccaggcccagcagcggcattgcgcgcgccaggctgagcgcgcggtcgaaatcagtgccgccgatatgcacgccgccattggccaggatgtcgtcgcgccggtcgctgcgcgcggcgcgctcgggcgacaggcgcaccagcgagaagtccgaggtgccgccgccgatgtcggccaccagcaccagttcctcacgcgtgatccgggcctcatagtcgaaggccgcggcgatcggctcgtactggaacgcgatctcgccgaaacccgcgtcgcgcgcgatctcggccagggtgtcttcggcgatctggtcggcggccgggttctcgtcgatgaagaacaccgggcggcccagcaccgcacgcgagaattccgcgccggcggcctgctcggcacgcgtcttcagctcgcggatgaagtgcgccagcagcttgcggaacggcatcgcctggcccatcacctcggtgctgtcgtccatcatcgaggtgcccagcaggctcttgagcgaacgcatcagccggccttcatagccggccaggtaatcgcccagcgcggcgcggccatagctgaccagcggatcctccgcgtggaagaagatcaccgagggcaacgtcaccttgccgtcctccagcggcagcagcgccgccggccgcgccggatggctccagccgaccgttgagttggacgtgccgaagtccaggccgcatgcgtttgacatcattgattccgtttcctgcaagacaccactaaaaaagcccgcgcgccagcgggccgcgcggacggggcgccattgtatggcaggtgccggccaggcgcccggcttgacacgcccaaacgcggctcctatcctccgcatgttctctgttaaagatcgtcattctgttgtacagaacatgaaaaagccactgcgccatatccgcgtgctcgacctgaccaatgtgctggccgggccgttctgctgccaccagcttgcccacctgggcgccgaagtcatcaaggtggaaacccccggcaccggcgacctggcccggcagctgggcgccgatgccgagctgaaccagcgcctgatgggcgtgtcgttcctggcccagaacccaggcaagcagtcggtcacgctcaacctgaagcacgcgcgcggcaaggaggtgttccgcaagctggtgcaaagcgccgacgtgctggtggagaacttccgccccggcgtgatggaccggctcgggctgggctacgagaccctgaagcaggacaacccgcgcctgatctactgcgcgatctcgggctttggccaggacgggccgctggccgggctgccggcctatgaccagatcatccagggcatggccggcgtgatgagcattaccggcgatgcgcagagcgcaccgttgcgggtcggctatccggtctcggacaccatcggcgggctgaccgcggcgctggcggtatcggcggcgctggcggaccaccagcgcaccgaaggctatttcgtcgacgtatcgatgctggaagccacgctggccaccatgggctgggtggtatccaaccacctgatcgccggcaaggtgccggcgccgatgggcaacgagaacatgaccgccagcccttccggcactttccgcaccgcggacgggctgctcaatatcgccgccaacaagcaggaacagtttgaagccgtgtgccgcgtgctgggccgccccgagctggccgccgatccgcgcttcgcgcagcgccaggcgcggctggccaaccggggcgaactgacacaggcgctggaagcagagctggcgaagaagccggccaccgaatggtggccgctgctgaccgaggccggcgtgcccgccggcccggtgctggacgtgccacagacgctggcgcatccgcaggtgcgcgagcgcggcatgatcggcgaatttgccgatgcgcccggcgtgggccgcgatatccgcgtggtgcgcaccggcttcaagctcaaccgcgaggccccggccgtggacacgccgccgccggagctgggccagcatacgcggcaggtgctggccagcctgggctacagcgatgcggacatcgaccaactgagcgaggagcgcgcgatatgagcggcatcgaaaccagcggccagccccgggatgacgccatggacccgggccagcgcctgtcgcaggactggtggcgcaccggcatcatcgacatgcgcccgggcgagatccgctaccgcggctacccgatcgaacaactgatcggccgggtctcgtttgcgcagatgatctggctgatgctgcgcggcgagttgcccggccccggggagggcgagctgctggacgcggcgctgatggccgcggtcgaccacggcccgcaggcgcccagcattgccatcgcgcgcatggcggccacctgcggcgtggggctgaacaacgccatggcttccgccgtcaacgtgctgggcgacgtgcatggcggcgccggcgaacaggcggtggcgctgtaccaggacgtggcgcagcggctggatgcgggcggcgccatggacgacgccgtcaccgccgcgctgcggcactaccgcgacctgcacggcaagttcattgccggctttggccaccgtttccacccggtcgacccgcgtgcgccacggctgctggcgctggtcgaccaggccgcggccgatggcgtggtcagcgggcgctacgcggggatcgcgcgcgcggtcgaggcggcgctgggtgccggccgcggcaagcccatcccgatgaatatcgatggcgccaccgcggtgatctatgccgagctgggctttgccgcaccgctggcgcgggggctgttctgcctgtcgcgctcggtcggcatcctggcgcatgcctgggagcagacctgcgagggcgggcgcaacaagggcccgatgccgcgccagttcctgtggacctatgacggtacgccgcagcgcgacgtgccggagcctggccggcaggcataaccgggtcagccggccaggtcgggctctggctccagcagcggcgcgggcgatgcgctcgcggccgccggcgccgccatggacgaggccagcacatagcggtcgcgcccatgttccttggcgtggtagagggcgcggtcggcatcggcaaacaacaggcgccacagcgcttccttgctgcccgggccgccgcgcagctgcgccacgccaatgctgacgctggcatggccgcgcccggcgggcagttcaatcgcgcgcaccttgcgcaggatacggttggccagcgccgaggcctgctgctcgtcggtatgcgggcacaggatgcagaactcttcgccaccgtagcgcccggccacgtccgaggcgcggcgcgagttgtccagcgcatgcgcgacttcgcgcagcacggcgtcgccagcgtgatggccgaaggtatcgttgacctgcttgaaataatcgatgtcgatcaccaggcaggacagcgcctgcccgtcgcgctgccagcgcgccaccagcgacagtgccgacatctccagcgccccgcggttgagcagcccggtcagggcatccacgcgcgcgccgctttcgttgtgcgcgacgatctgctccatcgccatcacggtgaagccgaacaggcccagcagcgtggccatcagcggcgccagcagccaggccgagccgaccgggccggcaaagaacagcgtcagcggcgcggcgcccgcaccgcccgccacgggcaggttcatggcatggctgaagccggccagctgcgtggccagatgcaccaggctggccaccagcaccagcggcgcgccgatgctgcggcgcccgcgcccggcacgcgccagcgtggcaaaggtgcccagcgagaccagcgccagcaggccgtagacgatgcgcagcaccacctgctgcccgtcgggcatgccgctggtggccgcggtcaggccaagcccgatcacgcccgcggcggccagcgccgcgggatgggccggcacgccgtaatagacccgcacgccgcggtagatcagcaaccagccagccacgaacgccaacgctcccagcgtgcccagctggccggtgccgctggccgcgctgatggccagcgccaggcccgcggccgacaccagtacgtgcccgaacgcccacagccgccccgcctcgctcgcgcgcagcgcgaacaccagccccgccgcaataatcagcgtgctgcaaaaaaacaccatcatcaccaccgcaatggtctgctggtccaggtgcacggggatttcctcaaggatgccgtctgccgcgccgtcatatcgagcggcgggcatcaggccacaggggcgcgacgcaggcatctctcgcacttgttttcacaaaatgtgacatgcgttgtcttcaatgccagccgcatgatagcccgcgcatgcaggcgcgtggcacccccgacaagccgggtcgggccggctgcacacgcaagcccggcggctcagcccgcggaggcattgtccgcaatgctgtccggaaaggtgccgcccagcgcctgggtcagcgcgcgcgccgcatgcagcacatcgacgcggaagtcttcacggtagcgcgaggccgggcaggtcagcgtcagcgcgccgcacagcacatcaccgggaccgaataccggcgccgacaccccggcaagatcggggctgcggtcgcccaccagtgccgccacgccctcgtgccggatgcgctcgtagagcgtgccggactcgccggcaaaggcgcgcagcacgcgcgcgccggcgccccggtcgcgcggcagcagttcgccggcgcggacatggtcgcgcaccggctgcggcgaatcgacgcggtacaggcacagccggtgctcgccctgctcgacatggaaggccgcgctttcacgcgtgatgcgcaccagctcgcgcagcgccggcatcaccaccgcctccaatgagaacgacgcggcgtagacggcattgagccgcgccacctcgggccccaggccatagcgcccgtcggactggcgccgcaccagcccggcgtgctcaagcgaggccagcaagcgcagcagcgtgctcttgtacaggccgctgcgttgcgccagctcggccagccccagcgcggtatcgccgagacggaacaccgacagcacgaacagcgcccggtccacggcgatggcgccgcccgcggcggcgtgcttgtcggcttctgaaacctgtgcggctttgcgtggcatggcggacggcggcgatcctggctggaccggatgacggaacgatgcgccaacgtatagaacgcaccccggcttgtcaatccgccctgctccgtgtcaatgacccggcacacgtgcggcgagctcgcgcaacagatgccgcatgcgtccacgtatccgcccggcgcgctggcgtttttctgcaacaccgcggccggcctctgccgccgcccgggccgctgccaaagcgccttcgccgccccctcggctaccgcatgcgccacattgcttgcgcgtactcgccactcccggctttgcaagcggaattagagggaaagttacctgcttttgattcagcagccgctgcacggggtggataaaatcatgtgttgctgaccttcgcgcaatccctgcgctgctttccgtaccctcgctgcaatgtctcaccgccgtgcttttcccgaccctggtatgaccgttcccgctctctcgcttggcgccatcctggatgacctgcgtagtgccccgcgcccgctgacttccgcggagtacacatacctggcccacctgcggcagcgtatcgtcaccggcgacgcagacctgtggaccacgctcgagaccgcgggcgtgccatgcagggaacgccgcctgtcgcccgaggtggtgcaggcactgaccgcgatcggccatttgccaatgcactgagcccggcgcacgccaccccacattgcagaaatttccccggatcatttcggaaaaccgcaccctccagcctgcctgcgtcccgctacgatcgatttcctttcgattcgccgggcaccgtgctttcagtcaactgccaagcatgccccgccacggcccagccatggcttacccatccagcaaccggcgcgtcagcttcctgtcgttgcgcgcctatgtcgcagtgatgcagcaccgtgatgccgtccgcgccgcgcaagcgctgcgcatccatccgcaaaggctgtactaccacatccgcggcctcgaggccgcgctcggcaagccgctgttcagcacttgcagcccggactggctgccgacatccacgggcgtgaccgcactgcccaaggtcgtcgccatgctggccatctgggatcagatcgaggcgggcatccgtgccagccagcctgccgcggcggcccgggaagccgagcccggcgccattgcgcgctacggcgccgcattctgggtgcggcaggcgacgatgtagcgtcaggccagccgttcgcagcaataggcctcggtgcgataagggaaggcaacctcggcacggcccgccagcgcgggatgcccgtcgatgaccgcctgcagccgtgcgcgcacgcgggcctgctccgctgccggcagcgcggcaatgaagctcaccgacatcacccggtccacgatcacctgctgcggcgcccccacatgcgtgtagggctggcactgcagcgccagcggcccaaagccctcggcgggaaagacccgcttccagtcacccctgtagaaacgcggcgcgtcgccttcatacggcatcatgatggctgtcagctgcgccacccagtccacgctttcatcgcgcacgttccataccaacccgagccggccgccagggcgcagcacgcggccgatttccgccatcgcgcccgcattggcaaaccagtggaaggcctgcgcgcagaccacggcatcgacgctggcatcggccagcggaatggcctcggcactgccttccagcgcctgtaccgacggcagcgccacggccagctgagcgcgcatctgcgccaccggttcgactgcgatcaccgtcgtgccggtctccgccagccggcgcgtgaacttgccggtgccagcgcccaggtccagcacggtgcggccggcgcgcaggcccagcgtgccgcgcagccaggcgtcgatttcagcgggatattcggggcgtccgcgcgcgtaggtatcggcctggctggcgaatccctgtgcggcggcctggtggatggcggtcatgggcgagctccggttgcctaccggaggcgtagcctacgccccatgccggcacggggcaagcgggcggctagtgctgcatgccccagcggcgcaccgtcagccgttccagcgtggtgaacaccagtccctccaccagcagcccgatcaggatcaccgcggccagccctgcaaaaacgcggtcggtgtagagctcattgcggttctggaagataaaccagcccagcccgccctgccccgacgacgcgccgaacaccagctcggccgcgatcagcgtgcgccacgcaaaggcccagccgatcttcaggcccgacaggatcgccggcagcgccgccggcaccagcaccagcgcgacatagcgcagcccgcgcaggccgtagttgcggcccgccatgcgcagcgtcggcggcaccgcccggaagcccgcgtacatgttcagcgccagcggccacagcaccgaatggaccagcacgaagaccaagcttttggtgcccagcccgaaccacagcagcgccagcggcaacagcgcgatcgccggcagcggattgaacatggcggtgagcgtgtccagcacatcgcgcccgaagcgcgtggacaccgccagcgaggtcagcacgaacgccagcacgatcccggccgcatagccgcgcagcagcaccgacagcgaaatcgccgccttgcccggcagctcgccgctggccaccgcgtcgccgaaggcgcgcatcgtggccaggcatgacggcagcagcaggtcgttgtcctgcacgcgcgccaccagctcccagatcagccccagcgccagcaggatcaccgccttgcgcagccagccgtgttgccacaggcgctggtgccacggcagcgcgcgcgcaagcggcgcttcggtgaagggttcagactcgcgttcgtattcgggccgaagcgtgtcggccaatgtcagtgtcggttgcgtcatgatgcgatgtcccggttcagcggcccgccgcgctgcgcgcacgcggcgcggcctcggcggcgggttcgtcgaacagcaaggtatggatgcgttgcgcggcggcctggaattcggcgccgccctggctggccaggctgaactggtggctgttgagttccgcgcgcacgcggcccgggtgcggcgacagcagcaggatgcggctgcccaccaccagcgcctcttcgatcgaatgcgtgacaaacagcagcgtgaaggccgcgtcgtcccacagcgccagcagctcttcctgcatgcgccggcgcgtgagcgcgtccagcgcggcaaagggctcgtccatcagcagcaccttggggcgcatcgccagcgcgcgcgcgatcgccacgcgctgcttcatgccgcccgacagcgtatgcggataggcatcggcaaaaccggccagcccgaccttgtgcaggctgtccagcgccagctcgcgcgcctccgcccgcgacagcttgcgcgcctgccgcagcgggaacatcacgttctgcgccaccgtctgccacggcggcagctggtcgaactcctggaacaccacgatgcggtccgggccgggctgcagcacacgccggccttcaagccggatctcgccctcgctgggcggaacgaacccggcaaccgccttcagcagcgtggacttgccgcagccggacgggcccagcagcacgaagcggtcgccggcatgcacgtcgaagctgacacgatgggtggcgcgcacgatgcgctcgggcgtccggtattccagcgacacgccatcgacctgcagcaacggcgtggcgcgctccgacaccacgcgcaggttatggatggccatgctcagctcccctgcgcggtgaccgggtcctggaagaagtagtcctgccaggacttgggctggttgcggatcgcgccaacgcggtgcatgaaagcggccagcgcaaaggtgttctgcggcgccacgcggaactgcacctgcggattcttcagcacgcgcagcagcagcgcgcggtcggttttggccttgctctgccgcaggtagatgtcggcggccgcttccggattggcggtggcaaaggccgcggcctcggccagcgcatcgacgaaggcgcgataggtcttggggttgtcgctgcggaacttctcggtcgcgtacagcaccgtggaagaactcggaccgcccagcacgtcatacgaattcagcacgatacgcgcgttggggttgcccgccagttcctgctcctggaacggcggattgccgaagtggccggtgatctcggtgccgccggaaatgatcgccgcggcggcatccgggtgcggcaccgccacggtccacttgtcgaggcggttgtattccttgtcgccccattgcctggccgcagccagttgcagcacgcgcgactggaccgaaacgcccaccgccggcagcgcgatgcggtccttctcggtgaagtcggcaatcgacttcaccttggggttgttgctgaccaggtagtacgggaagttgcccagcgatgccacgccccgcacgttctgcttgccgtgggtgcggtcccacagcgtcagcagcgggcccacgccggcgccggcgatatcgatggcaccggacagcagcgcgtcattgaccgcggcgccgcccgacagttgcgtccattcgaccttgatgtcgacaccctgctgcttgccgtgcttttcaatcagctgctggtcgcgcgccacgttgagcagcaggtagaccacgccaaactgctcggcgatgcgcagcttgccttcggcgtgcgcgttgccggtgatggccaggccggcgctcagcgccagcaggccgagcttgcgggaaaaacgagaaaacatgacagaactccggggaatacagtggattggcgctcgccgctgcgagcgccctgggatgacttgcgacaccgtttccgccttcagcgcggcacgtcgccttcgatggtggtgcggtacatcacgcgccgctgttccggcggacagcccgcggcaagatgcagcagcgagcggttgtcccagaacaccaggtcatgtggctgccactggtggcggtagatgtgggcgggcttgacgctgtgcgcgaacaactggtccagcaggtcgcggctttcctgctcgggcaggccgacgatgcgggtggtgaagtgctcgctgacaaagagcgccttgcgccctgtctccggatgggtgcgcaccaccggctgcagcaccggcctgacctgcgcgatctgctccggcgtcaggtcgggccgccacgggctgcgctgctgcagctcggcatagcgcgccaggtaggtgtgctcggcgtgcaggccatcgacggcgcgttgcagcgccgacggcagcgtgtcccaggccagatgcatgttggcgaacagcgtgtcgccgccttcggcgggcagctcgcgcgcatgcagcagcgaaccgaggctgggcttttccttgtacgacaggtccgaatgccagaagtggccggcatcgccgagcccgatcggcttgccgttctcgaccacgttggacaccaccagcacttccgcatggcccggcagctggaactggtgcagcacgtggatctgcaacggcccgaagcggcggctgaaatcgatctgctgcgcgggcgtgatctgctggtcgcggaacaccaccacgtggtagtcgaggtgggcgcgatggatgcggacaacatccgcgtcggacagcggctgcgacaagtcgagcccgatcacttccgcgcccagcggcgcgtccagcggacggatctcgaagttgcccgcgtctgctgacaatgcggtggaaagcggcgcgctctgctggcgcgaaacactagcgtgggcggttgcggtcgtcatggcaagctctggcacgggggaaaccgatgcggcatccgggatgccgcgtacaagcttgcactgtagagagccggccattgcaccgtcaacgaatcatattgctggcccttatccgcttatcgcatatccatgtctcgacatttgccagccatcagggcttgccggggcaagcgctgcggcacggcacgttggccgtatccgggcgcgcgtcggcgacaaagccatcgcggttcggcatcttcacctgcggcagcgtgcgcgcgtccagcaccgcatccgcgggcaggatgccgttcttgtgcagcagccacgcggtgacggcatagacctcgtccggtgccaggctctgcggcgcgttgtagggcatggcacggttgatgaagtcgaataccgtggtcgcataaggccagaagctgccgatggtcttgaccgggtccttgcccctggcggcgtccttcagcgtgccctgcccgcccaccagcgcatcggccggcttgccttcgccattgacgccgtgacatgcggcacagtgctgcgcatagacctgctggccacgcgcgaccgtgccgctgcccggcggcaggcccgtgccgtccggggtcacgtcgatattccacgcggcaaggtcgagctcgctggcggggcggcctatgccgtaggcctgcgcaaggaccgtttgggccgcgcaagccagcgccagcacggcggcggcgccactgattcgttcaagcgcgcgcattggcaatactcccgtccgcggccacgcgccagcgctggatcgcgttgtagtgataggtggaagccacgccgcgcgcggccaccagctggtccggcgtgggctggacgttgccggcttcgtcgatggcgcggctctccagcgaagctggcccgccatcccagcgccacggcaggcggaagcgcaccagcgcgcggtccagcaccggctcctgcaactgcgcctcgcgccagctgcggccaccgtcgaccgacacctcgacgcggcggatgcgcccatggcccgaccacgccaggcccgagatctcatagaacccgcgctcacgcagtctgtgatccggcgcggggaaggtaatcacggacttcacgtccatcaggaaggtgaactgccgcgcgctgccgtcgggcaaggagtccgtgtacttcgacgtctcttcgcgcgacatgaacggcgcgcgccccagcttcaggcgccgcagccacttgatggacatgttgccctcatagcccggcaggaacagccgcagcggatagccatgctcgggccgcagcatctcgccgttctgcgcatagaccagcattgcatcttccagcgccttggccagcggcacgctgcgcgtcatggctgcgccatcggcgccttcggccagcacccaggccgcatccggcgccacgccgacttcatcgagcaccacggacaacggcacgccggtccactcacagcaagacagcaggccgtggctgatctgcacggacttggcaccgggcgccttccactcgcgtccggtgttgcccgagcactccaggaaatggatgcgcgataccgacggcaggcgcaccaggtcgtccatggtgaagatgcgcgggcgcgccaccagcccgtgcaccgccagccggtgctgcgccgggtcgatcagcgggatgccggcgtgatggcgctcgaacaccagcccggtcggcgtgatgatgccgcgcaggtcctgcagcggcgtcatcgacgagttggcgccgggaagcggcgccgcgctgcggctgcgccgcaccacgtctttctcgaacggggacggctggccgtaggcatgccacagcacgggctcgcccggcgtgcgcgtccacggcgcaaccgtcaggggctcagcgcgcgccgcagtggcggcgccggccgcggcggcgcccagcaccgccccgcgctgcaggaagcgccggcggccggaagtcaggtcattgctcatcgttagggcgtggtcagtctggtagcgatcaaaatgcgcagactgtaggacagcaccggcactcggccaacgaagaagaatgcatgccgatatgccaacgccgcgctgcgcgccatatgcgcggggccgataaccaaagccggaatcattcgttcaggtccgcgcgccgcgccgcttatcgtggagccgtcctccacttcaagaaggtctgcacgatgacgaccccgcgcccagatgccaccgctgcacccacgctgacccgccgcgagctgctgcgctgcgcggcctggtccgggctgggcatggccgcgtcgctgtcgccgctgtccgcgttcagcgccagcccggccgcgcggcccgacgtgatccgcgtcggcgtggcccagcccgccaccggcaccccgcccggctttgccggcagttcgctggcgattgcccatgcgcgcggctggctcgaggaatcgttcaagccgaccggcacgcgcgtggagtggtttttcttcaagggcgccggccccgccgtcaacgaggcgctggccaaccgccagctcgacttcgcgctgcagggcgacctgccgtccatcgtggcgcgctccgcgggcctgaagacgcggctggtgctggccactggagtgcgcgccaacatctacgtgggggtgccgcccgattcgccgctgaagacggtcagcgacctgcgcggcaagcgcgtgtcgctgttcaagggcaccaacatgcatctgccggcgctgcgcctgctggaagcgaacgggctgtcggacaaggacctgcgcctgctcaacctggacacggccggctacctggcggcgctgtccacgcgcgacatcgacgccgccatcggcgccatggacatcctgcgcctgcgcgacaagggcgcggtgcgcatcctgtactccagcaagaaccagtcgccgatctacacacggcaaagccacgtactggtgagcgacgatttcgccgggcgctatccggaagccacgcagcacctggtgaaggccgcggtcgaggcggcgcggtgggcctcggacgagagccatcgcgaggaggtgctgcgcacctgggcgcgcgcgggtacgccttatgaccactggaaggaggacttcgacggcgagccgctgcgggtgcggctgaacccgaatttcgatcccttcctggtcagccgcccaaggatgcggtcgagcaggcctatcgcttcaaactgagccgtacgcgctttgacgtggaccagtggatcgaccagcgcttcctgaaggccgcactcaacgacctgagcctgcagagctactggcccgtctaccagcccaacggcaagatcctgggagcctgacaccatgtccgtcgccgaatcgctttcactgcccgccgcagcagcaccgcgcgcgccttcctcacgcaagccactgcgctggcaggatgccacacgctggctgctggcctggccggtgccgctggcgctgctgctggtttggtacgtggccgcccgcaatgcctggattccgccgcaggtgctgcccgcacccgaagacgtcgcacgcacgctggccgacctctggcaaagcggggaactgcaggccaacctggccatcagcgcgctgcgcgtggccggcggcttcgccgtggggctggccggcggcctggcgctgggcgcggccatgggcctgtcgccgacgttgcgcgactacgtctacccgaccttcaaggcgttcagccaggtgccggtgctgggctggctgccgctgctgatgctgctggtcggcatcgacgaagcgctcaaggtgatcctgatcgccaaggccgccttcgtgccggtggcgctgaacacgtacaagggcatcggcagcgtgccgacccgctacctggaagtggcgcgggtgctgcagctcacgcgctggcagacgctgtcgcgcgtggtgctgcccgccgcggccgcgccggtgtggaacggcgtgcgctacggccttacgcacgcatggctggcgctggtggtggtggagctgctggcctcgtccgaggggctgggctacatgatcgtctacgggcgccagctgttccagctcgacatggtgctggccgccgtggtggtggtgggcgtggtgggctttgcgctggacaagacgctggcgctggccgaaggcgcggtgctgcgctggcgcaagccgggcttctgaggcgaggccgcgatgaccacgtccgctatccgcccccgtattcgcctgcaccgcgccttgcgcggctgggtgctgccgctcgcgctgctcgcgctgtggtgggccgccgtgcgctttggctggaccacttcgccgctgctggtgccggtatccagcgtctgggacaccgcggtgcgccagctgcagagcggcgcgctggccacggcattggccgccagcctgtggcgcgacctggccggctttgccatcggcgccagcgccgggctggtgttcggcacggcgctgggcctgtcgcgcctgttcgaacgcatggtcggtccgagctttcacacggtcaagcagatctcgctgtttgcatggatcccgctgatctcggtctggttcgggctgggcgatgccgccaaggtggtgttcctgtcgctggccgcattcttcccggtggtgctgaacaccttcgaaggcatccgcgccgtgccggcggacctgctcgaggttgcgcgcgtcctgcgattcagccgcacccaggtgctgtggcgcgtggtgctgccgtcggcggcgccgtcgatcttcgccggcatccacctggggctgatctatgcgtggctggccacgctcggcgccgagtacctgctggtatccggcaagggcatcggcaacaccatgaccgacggccgcgagaacttctggatggacctggtgatcttcggcgtgatcgtggtcggcctggtcggcttcacgctgaactggattgccagccgcatcgaatcgcgcctgctcgcctggcgcgggcgctcggtggcagcgggctgagccacgctgcaccttattgaacggagactgcaaatgccacatgccggcacgctaagcatcgcgcacctgcacaagcagtacgaagtcgagggccgggcgctgcccgtgctcgaggacatcaccctgaccatcgccccgggagagttcgtcagcatcgtcggcgccagcggctgcggcaagtccaccctgctgcggctggtggtgggcctggaagaggactaccgcggcaagatcctgctggacggcaagcgcgtatcgggcaccagcctgcagcgcggcatcgtgttccaggagcatcgcctgtttcccatggctgtcggtggaacagaacatccggctggcgctgctcaacacgccgggcagcgacgcggagaaagaccgcaacgttgccgagcatatcgcgctggttggcctgcgcggcttcgagcaggcctatccgcaccagctctctggcggcatgtcgcagcgcgtggcgattgcgcgggcactggtgacgcgccccgagatcctgctgctcgacgagcccttcggcgcgctcgacgcgatgacgcgggcctacctgcagcaggaactgcagcgcatctggcaggccgagggcatcaccatgatcctggtcacccacgatgtcgaggaagccgtcttcctgggcgaccgcgtggtggtgatggaaccccggcccggccgcatccgccgcatcctgccggtggacctgccgcatccgcgcgaacgcgccggacttcccttcgcgcgcgtgcgcgatgccgtgctgcgcgaattcgccgggccggagcctgtcgtgcagcggacccccgaacctgaactcgcctgacccaaccctcttacatccccggagcttcgcgatgacccaagccaacgccacgcaagaccagaccgtccagctcgacatccacccggttgccggccgcatcggcgccgagatccgcggcgtcgcgctgcacggcgacctgccgcccgccaccttcgccgccatccgcgcagccttgctcaggcacaaggtgctgttcttccgcgaccaggtccatctggacgatgccgcgcagcagggctttgcgcgcctgttcggcgacaccgtgccgcacccgaccgtgccctcgcgcgacggcacgcaactgcttgagctcgactcgcagcacggcggccgcgccaattcctggcataccgacgtgaccttcgacctggcctaccccgcggtctcggtgctgcgcgccgtgaccgttcccgccgccggcggcgacacggtgtgggccaacaccgctgccgcgtaccaggacctgcccgagccgctgcgcgaactggccgacaagctgtgggcactgcacaccaacgactacgactacgcggccacgcgcgtcaatccgagcgacgaagggttgaagcgctaccgcgagctatttacctcggcgctctacgagaccgagcacccggtggtgcgcgtgcatccggaaaccggtgaacgcacgctggtgctgggccacttcgtcaagaagctgctggactactcgtcggccgattcggcgcacctgattgccgtgctgcagggccatgtgcaccggctggagaacaccgtgcgctggcgctggcgcgcgggcgacgtcgccatctgggacaaccgcgccacccagcactacgccatcaacgactatggcgacgcgcaccgcgtggtacgccgggccaccgtggccggcgacatcccggtcggcgtggatggccgccgcagcaaggcggtgaaggcgggcgtgcgcaacgaaggcgcggcgccggccaaccagtccgccggtgccgcgcaacggcaagcggcctgatttggccagttgcttccggggagcacgatccatgtcacagcaaaagccggcgcgccagctgcatctgggcgcctttctccaggccaccgggcaccatgtcgccgggtggcgccatccgggcgcgcaggccgatgccgggcgcaacctggcgcactacatcgcgctggcgcagcgcgccgaggccgcggggttcgatgcgctgttcctggcggacggcgttgccatccgcggcatggatgatgccaccctgccgcgcaccgcgcgcgccgccaccttcgagccgctgacactgctgtcggcactggcggcagtgacgcagcgcatcggcctggttgcgaccgtctccaccacctacaacgagccctttcatgtggcgcgaaagttcgcctcgctcgaccacctcagcggcggccgcgcgggctggaacgtggtgacgtcgtggtcggatgccgaagcgcgcaacttcagcctcgaacgtcatcccgcgcacgcggatcgctacgcccgcgccgaagagtttgtcgacgtggtcaccgggctgtgggacacctgggaggacgatgccttcctgtatgacaaggacagcggccggcatttcgatgcggacaagctgcacacgctcgaccatcgcggcgcgcacttccaggtgcacggaccgctcaacgtcgcgcgcccgccgcagggccatccggtgatcgtgcaggctggctcgtcggaggccgggcaggaactggcggcccgcaccgccgaggtcatcttcaccgcgcagcagtcgctggccgatgcgcaggccttctatcgtggcctgaaagcgcggctcgcgcgctatggccgcacgtttgatcaactcaagatcctgcctggcgtgttcccggtggtgggccgcagcgaggccgaggcgcaggagaggttcgaagcgctgcaaagcctgatccatccatcggtggggctggccctgctgtcgcagcacctgggcgggatcgacctgagcggctatccgctggacggcccgctgcccgacaacctggccgaaccgaacggcgccaagagccgcttccagctggttaccggcctggcccgtcgcgacgggctcaccatccgccagctgtgcctgcgcgtggccaccgcgcgcggccattggtcgatccacggcacgccgcagtccatcgccgaccagctgcaggcgtggttcgagggtgaggccgccgacggcttcaacgtgatgccgccctggctgccgggcgggctcgatgacttcatcgaactggtgctgccggaactgcgccggcgcgggctctttcgcgagcgctatacgggcaccacgctgcgcgagcacctggggctgcgccggcccgagaacctgcgctggcggcaggtcgaaccaccgctcgcggtcggggcatgaccgctgcgctgcggcgccgcgcatatccaaatgcaataagcttccttgcctcgcgcgagcgccgtcggcaaccatagcggccacgccgcaggggcgtgcgcgggccggctggtaccatcgcacggcctggtgcgcccgcgcggcgcaccgctcggcatgcccggcgccatggcaggcactgccccgtcgcgccggtccggcacccaacagcgagacgaagagagaagaagatgagactcgaaaccctggccgtccatggcggctattcgcccgatcccaccacgcgcgcggtggccgtgcccatctaccagacggtggcctacgccttcgacagcgcccagcacggcgccgacctgttcgacctgaaggtggccggcaatatctacagccgcatcatgaacccgaccaacgacgtgctcgagcagcgcctggccgcgctcgagggcggcgtgggcgcactggcgctggcgtccggcatggcggcaatcacgtatgcgatccagaccattgccgaggccggcgacaacatcgtctcgtcgagccagctctatggcggcacctacaacctgctggcgcacacgctgccgcagtccggcatcgagacccgctttgccgatggccgcaacccggccagcttcggcgacctgatcgacgcgcgcaccaaggcgatcttcgtggagtcggtgggcaacccgctcggcaacgtggtcgatatcgaagccatcgcgcgcgtggcgcacaaccacggcgtgccgctgatcgtcgacaacacggtgccgtcgccctacctgtgccgtccgttcgagcatggcgcggatatcgtggtgcattcgctgaccaagtacctgggcggccacggcaacagcgtcggcggcgccatcatcgacagcggcaagttcccctgggcccagcacaaggaacgcttcaagcgcctgaacgagcccgacgtctcctatcacggcgtggtctacaccgaggcgctgggccctgccgcctatatcggccgcgcgcgcgtggtgccgctgcgcaataccggcgcggcgctgtcgccgttcaatgccttcctgatcctgcaaggcatcgaaaccctggcgctgcggctggaccgcatcaccgagaacgcgctggcgattgcccgccacctgcagcagcatgccaaggtggactgggtcaactttgccggcctgcccgaccatgccgaccacgcgctggtgcagaagtacctgggtgggcgcggtcccggcattctgtcgttcggcctgaagcaaggcggccgtgaaggcggcgcgcgcttcctggacgcgctgcagctgttcacgcggctggtcaacatcggcgatgccaagtcgctggccacgcatccggcgtcgaccacgcatcggcaactcaatgcggaggaactgaaggcagcgggcgtcagtgaggacatggtgcggctgtcggtcggcatcgagcatatcgatgacctgatcgaggacctggatcgcgcgctggcggcggcctgaccgcaggctaccgacgtcagagcgacccgctggtttgctcccctctcccgctcgcgggagaggggcagggggtgagggcaggcggtcgcataccgccagcacaacctaccccccaccacgcttgccgtgcgcctccagcacaaagtagccgatcgccccgatcatcagcggaatcaggtaatacatcgcgcgatacgcaatcagcgccgccagcagcagcccgtgcggcacctggccgcccagcatcgtcaggaacacggtctcgatcacgccgaggcccccggggatccgcaccaccacgcccgccagccccgacgcgagcaataccccaagcaccgtgaagtaccccgcatgcgtatgcagcagcgaaaacaggatcgccgccattgccatccagtgcgccgccgacaagaggatttgcagcgccgcgaagccgaccgacggaacgtagatatcgtggtcgcgcacggtccggtgccggccgtgccaggtggcacaggcagccaggtaggcagccggcaccgccagcatcagcgcgcccagcacccgtgtcagcgcggcgggaacgccccactcgggcggcagcaccaccagctgcgccaccaggatgccccccgccagcaaggcatagccgagccagttgctgctcaccaccaccacgaacaggctccagatctgcggcagggtcagcccggcgcgcgtgtacaggcgatagcgcacgcccgcgccgcccagcgtggccccgaggttgaggctgagcgtgtagctgacataagagatcgccatcacccgccgcgccggcaacgggtgtccggcatagtggcagccgaggcggtcgaactggctgtacaacaagccgctcagcgcaacgaaggccgccgccggcgccagcgtgcgggcgttgaagccgcgcagcgcggccagcaccgcgtcccagtcgatggtgcccagcttgcgcgcgatcagcgccagcaccgcggcaatgaacaggatgccgatggcacggcgccacgcgggccagtgcgcgtgctggcggatggccgagaaggtcgtcgcgcccatcattgcgcgcctcccctcgtcgccgcgcaccgcaaaaccggcgtcaggaatgtgcaggaatgcaagcctgcgcgcgccagcccggcatgcaatttctggcctgcctcggcttcaaacaggataaaagtttccggcagtgcgctttcgcgcgcgcacgggatggcgccggccccgcacgacaggcgccgctctgcgccgtgccctggccggcggaaacgattggaggcggactgcatcggtgtcatgacctgagaaagccgcaaacaccgtgccagcacgggcacgtcaaccacggccacggctgcgccgccagcgcgccagggctgcggccgccagcgcaccagcggcaagcccggcaatgaacaccgcggcagtggtcccctcccagcccgccgcggccgcaacatctgcacggccccgcgcaaggggcgcgagcgactgccagtcggcagccgtgaactgcgtcatcgcctgcgccccgtccaggccatacacgcagatctccccgcccggcagcttgcagaagcgctcgcgcgggcaggccttgaggatggcctgcggggcgccctcgccgcagctggccccggcgctgcgcaagacctggatcgtgacttcgggatgccgggtaagttgttcgggcatggcggcctccatacgggtgacgctgtccttcagcgtagtgcagccaggcgccggcgcccttattcaccagcggcatatgaccatgcgtaataactcgttcgcctattgcctgcctttccatacaatgaggcgacgccgcggcgggacgctgccggcctccaacaacataacggggagcatcagatgcaatacgggaaattcggcttcgtcgcacggctggcggcagcggtgctggcactgggcgtgatgcagggtgcgggcgcggccgatccggacaagaaggaaatccgcttcggcgccaccgccggcccctacgccgaccagatccgctatggcgtgaagccggtgctggaaaagcgcggctacaaggtcaccatcattgagttcagcgactacgtgcagcccaacctggcgctggccgacggcgccatcgacgccaatgcgttccagcacgtggcctacctgaagaagttctcggccgaccgcaagctggcgctgaccgacgtgatccaggtgccgaccgcgccgatcggcatctacagccgcaagcacaagggcctggccgaggtgaagcccggcaataccgtgtcgctgccgaacgatcccaccaacctggcgcgcgccatcgccatcctgcagcagatcggctgggtcacgctcaagccgggcaccgacccgatccgcgccagcgagcgcgacatcgacgccaacccgcacaagctcaagctgatccagctggaagccgcccagctgccgcgctcgctcgacgacgtggactatgccttcgtcaacggcaactatgcgctggcctccggcctgaagctgacctcggcgctggcgctggagaagattcccgactattacatgaacctggtcgcggtgaagacggcggacctgaacaagcccttcgtcaaggacatccgagaggcctacgagtcggcggagttcaaggccgtgacgcagcagcgctttgcgggcttcgtgcagccgccgtaccagcgctgagccaccgcgctctcgccagcaagaaagcgccgccaggcgctttcttgcatttgggacagctgtcgcgcgcattgtgcgcagcaagacaattttgcgccgcgcgcgccgcgcaaatgccctacactcaagctcaagtcccccgcgcccaaaaagcacggcagggatcacaacgcgatcattgctgcggatagctgcgaagatcctcgcggccgtcccagcggatcctgtcgagacaaccgcatcgagagacctgccatgtccacggttgcgcgctttgagatcggctacacccgctaccttgccccgccgggcgacacctcctcccccacttctcctcccccaccccttgccagcaaccccgacgcgctgctgccgctgtaccaggcgatggtgctgacgcgccagttcgacctgaaagcgattgcgctgcagcgcaccggcaagatcggcacctttgcctcggccctcggccaggaagccatcggcgtgggcgtggcctttgcgatgcggcccgaagacgtgctggtgccctcgtaccgcgaccacgcggcgcagtttgtgcggggcgtcacgatggccgagagcctgctctactggggcggcgacgaacgcggcagcggctttgcggcggcgccgcatgactttgccaactgcgtgccgatcggcacccaggtctgccacgcggccggcgccgcctatgcgttccagctgcgcggcgagccgcgcgtggcggtctgcctgctgggcgacggcggcacctccaagggcgatttctatgagggcatgaacatggccggcgcgtggcacgcgccgctggtgatcgtgatcaacaacaaccagtgggcaatctcgatgccgcgcagcggccagaccgcggcgcagacgctggcgcagaaggccattgccgccggcatccccggtgagcaggtcgacggcaacgacgtggtcgcggtgcggcaccgcgtcggcgaggccatcgcgcgcgcgcgcgacggcggcggcccggcgctgatcgaggccatcacctatcgcctgggcgaccacaccaccgccgacgacgcctcgcgctaccgcgacgaggccagcgtcaaggcgcactggcaggaagagccgctgctgcggctgcgcacgcacctgctggcgctgcacgcgtgggacgcggcgcgcgaggaagcgctggtcaaggcctgctcacagcaggtggcgcaggccgtggagacttacctggccgtgccgcagccggacccggccgcgatgttcgactgcctgtacgcaaccatgccggccgaattgcaggcgcagctggagattgcccggcgcttcctggcgccgcacggataaccagcaaaccctgcgccttcacctggcgaccacagcgagcgaaccatggcggaaatcaatctggtcgaagcagtcaacctggcgctggcccatgcgctcgagcacgatcccgatgtgctgctgctgggcgaggatatcggcgtcaatggcggcgtgttccgcgccaccgcgggcctgcaggcgcgctttggcgcggcgcgcgtcatggatacgccgctggccgaaggcggcatcgtcggcgcggcgatcggcatggcggcaatggggctcaagccggtggccgagatccagttcaccggctttatctaccccgcggtcgaccacatcatcaaccacgccgcacgcatgcggcatcgcacgcgcgggcgcttgtcatgtccgatggtggtgcgctcgccgtgcggtgccggcatccatgcacccgagcatcattccgaaagcccggaggcgatgttcgcgcatatgcccggcatccgcgtggtggtgccttcatcgcccgcgcgcgcgtacgggctgctgctggcggccatcgccgatccggacccggtcatcttcctcgaacccacgcggctgtaccgcctgttccgccaggaagtggccgacgacggcgccgcgctgccgctggacacctgcttcacgctgcgcgaaggcagcgacatcacgctggtgagctggggcgcgatggtgcaggagacgctcgccgccgcggacgcactggcaggcgaaggcgtgacggccacggtcatcgacgtggccacgctcaagccgctggacatgcagaccatcctggaatcggtgacgcgcacgggccgctgcgtgatcgtgcacgaggccccgcgcaccgccggcttcggcgccgagatcgcggcgcagctggccgacgcgggcctctactcactggccgcgccggtgcagcgcgtgaccggcttcgacaccgtggtgccgctggcgcggctggaatacacctacctgcctggcgtcgcccgcatcgtcgacgcggcgcgcaaggcgatggcagcgtaatgcgagagttgccgacgataggcaaggagtgccgatgagaatcttcaagctgcccgacctgggcgaaggcctgcaggaggccgagatcgtgacctggcacgtcaagaccggcgacaccgtggccgctgaccagccgctgctgtcggtggagacggccaaggccatcgtggaaatcccgtcgccctatgcaggcaccatcgccaagctgtttgcgcagcccggcgatatcgtccacctgggcgcgccgctggtcggcgtcgagggtgcgggcgaggatgccgacgccggcaccgtggtgggctcggtccaggtcggcacgcacgtggtcaatgaagccgcgcccgcgggctccgcggcacccgccgcggccatggccgcccgcgtcaaggccacgccggcggtgcgcgcgctggcgcgccggctcggggtggacctggcaatggccacggcatcgggccccgagggcgtcgtcaccgccgccgacgtggagcgggtagccagcacgctggccgaactgggcacgccggaacagctgcgcggcgtgcgccgggcgatggcgcagaacatggcgcgtgcacaagccgaagtggccgccgccaccgtgatggacgacgccgacatccacgcctggcagcccggcgccgatgtcaccatccggctggtgcgcgccctggtggccggctgccgcgccgaacccggcctcaatgcctggtacgaaggccagaccgcccgccgccacgtactgaagaagatcgacgtcggcatcgcggccgacctgcccgaaggcctgttcgtgccggtgctgcgcgacgtcggcaaccgcgatgccgcagacctgcgccacggcctggaccgcatgcgcgccgacatccgcgcgcgcaccatcgcgccggaggagatgcgcggcaacaccatcacgctgtccaacttcggcatgatcgcggggcgctatgccgcgccaatcgtggtgccgccgaccgtggcaatcctgggtgcggggcgcgtgcgcgaggaagtggtagcagccggcggcgtgccggcggtgcaccgggtgatgccgctgagcctgacctttgaccatcgcgtggtgacgggtggggaggcggcgcggtttctggcggcggtgattgcggatctggagatggcggtgtagcggtcgaagacaacagggagccgacgagcaaatagcctcggagaatactgccgcccctcgtgtacgctcccctctcccgcaagcggaagaggggagcaaaccgccggtgtgctggcaccgatcgggaatcgggcgctgcggtggccctgtatataatgcgtttccgatcgccgctgccgtcaagccggacctatccggacagccggacccccctcatggaatccaagaccgcccgccttaccatcctgatcgatccggtcaagaaaaaggcctttgaaaccctgtgcgcctcacaggacctgacaccgtcgcaggtcgtgcgccagctgatccgcgaatacctggcccagcatggcgtggaatacgccaccaagcccaagcctgcgggcagcacccggcagaagaagtgactcagcgcggggcgtcgccctcgcctgcatcttcgcttgccagctcgccgcagcgctgcaccacctgcgccagcgaatccacgtagttgccctcccccagcgccgccagcacgcctgcgcgcgccagcttttccctgacccgctcgttggcttcggccagcaccaccggcacgccgcgcttctgcagcgtcacgatcacggcctccagcgtctgcagtccggtcatgtccatgaagggcacgcggcccaggcggatcagcagcacgcgcggctcggtatgggtctgcaccagtgcgcgctcgcacgcttccacggcaccgaagaagaacggtccgtcgatggcatagaccagcacgcccggcggcatccgcgcgggcaggccggcgccggtatcgcccagttcgcgctctacgtccacgacatcctggcgcgccacctccactgacgccgacatgcgccgcaggaactgcagcatggccaggatcaccccgatattgaccgccaccaccaggtcggtcagcacggtcagggtgaaggtgatcagcaggatggccacgtcggcgcgcggcgcgcggcggaccatgcgcgcgaactggcgcccctcgctcatgttgtaggccaccacgaacaggatcgcggccagcgtcgccagcggcacactggccgcgagcggcgccaggaacagcagcaccattaccagcgtgagcgcatgcaccacgccggccagcgggctgttgccgccattgcggatattggtggcggtgcgggcgatggcgccggtggcggcaaacccgccgaacagcggcgccaggatattggcgatgccctggccgaccagctcctggttggaatcgtgccgcgtgcccgccatgccgtcggccaccaccgcggacagcaatgactcgatcgcgcccagcatggcgatggtgaaggccggcccggccagctccagcacgcgtgccagcgtgatgtccggcagcgcgggcacgggcagcccgcgcggcaggccgccaaaggcggtgccgatggtggcgacgccgtcaaagcggaacagcgcctgcaccgcggtggcaaccagcagcgccaccagcggcccggggatgcgccgcagccagcgcacgcgcggcgcgcccactaccagcgccaggctgcccagcgccagcgcggtggtggccgggtgccattgcggcagcgcctgcagcaggtgccagagtttttcgtggaaatgctcgccggcgaccggcggcagaccgaagaaatcgcgccactggccgacaaagatgatcacgccgatgccagccgtgaagccgacgatcaccggcgcgggaacgaaccggatcacgctgcccagccgcgtcagccccatcgccagcaggatcagccccgccatcagggtggcgatctgcaagccgtcgatgccatggcgcgcggtcacggcggacagcaccacgataaacgcgccggtgggccccgcgatctgcagccggctgccgccgaacagcgacaccgccagcccggcgacgatggccgtgtacaggccctgctccggcttggcgcctgacgcgatcgcaaacgccatggccagcggcagcgccaccaccccgacgatcacgcccgacacgatgttcggcagccagttgccgcgtcggaacaatccggccagccaagcttcgcgcagcgcgatcatgcgtcaatccctcgggttcgagcaggatgatgatggtgcattggataataacagcatgttaatgcccgccggcttgcggctcgcgccgtgatattcgccacgcctgcactgtcgcttatgccactcaattcctatactggattggctcgcccgggcgtacggggtatgggccagggcggacgcggcaatcttctgcaatcggaggcccatcatgttcaagcacctccttgtgcctaccgacggctccgcacgcgccgacgcgatggcggcccgcgccatggcctttgccagccgcatcggcgcccgcgtgaccgggctgcatgtgattcccgagtaccacgtactgacctaccggctgaccagcctgcaggacaccaaggacacctttgccgcagaagcagcgcgccacgcggataccttcctggccgcgctcagccacaccgcggcgcaggccggcgtggcctgcgagaccgttacggccaccgacgaccatccctggcaggccatcatccagtgcgcgcagcagcgcgactgcgacctgatcgtgatgtcgtcgcatggcaagcgcgggctgcaggcgctgctgatcggcagcgaaacccacaaggtcctgacccacagcacgatcccggtgctggtcttccgctaggcggccgggcgaacaacgagacagcgcgatagcgggcaacagtgcgcggcgacgcgcgtttccaaaccacgccaactgcaaggagcgcaaccatggcgattcgactgggcgagcaagcccctgatttcaccgccgacaccacggaaggcaagatcagcttccatgaatggatcggcgacaactgggccatcctgttctcgcatcccaaggacttcacgccggtgtgcaccaccgaactgggctatatggcccggctcaagcccgaattcgacaagcgcaacaccaagatcatcggcctgagcatcgacccggtcggcgaccaccagcgctgggtcaaggacatcgaggaaacgcagaactgcaccatcaactatccgatgatcggcgacgcagacctgaaggtggccaagctctacgacatgatccaccccgaggccagtggcagcggcccgcgcacggcggtagacaacgccaccatccgctcggtgttcatcatcggcccggacaagaaggtcaaggccatgctggtgtacccgatgagcgccgggcgcaatttcgacgaggtgctgcgcctgctggattcgctgcagctcaatgccaagcacaccgtggccacgccggtgaactggaagccgggcgaggacgtcatcatcccgacatcggtctcggacgaggaggccaagaagaagtacccgcagggctttaagaccctgaagccctacctgcgcacggtggagcagcccaagtaaggggagcgagaagcgccagcaccagggagtgcggccgggcgtgggggtcacgccggccgccgccgggcctcccgggcagtcacggccgggaggcccgacttgtccacaggaactatccacagcttcagtggatatcccccctcttgacaaccgcaaagggcgcgccggtgctggaattcactggagtgcccgttttataggcaaccctccgggctacgggaatggttgcgggcgttcgaattttgtgcctgttgcgattcttccgccaccgggcgctcagcgcgtcagcacctcgcggatggtgtcggccagttccttggccacgaatttcgctacataagcgtccgcgcccaccttgcgcacatgctcctcgctggcctctcccgacagtgacgagtgaatcaccaccggcagcgacttcagccggctgtccgccttgatcttgcgggtcagggtgaaaccgtccatctccggcatctccaggtcggtcagcaccagcgccacctcgtcctgcactgacctgccatggctggccgcctcggcggcgatgcggtcgagcagctcccacgcctccttgccggacttggtcatcaccaccggcgcgcccagcgccttcagcccctgctcgatcaggccgcgcgccagtgccgaatcgtcggcggcaatgaccttggcgccggggcgcaggctcaactgcgggccgaccgtgcccgggtccacgtccggctgccgcgtcggcagcacatcgcgcaggatctgctcgacgtccagcacctgcaccagccgcgacgggtccgcgcccccggcggtgtccccgtccagcttggcgatgctggtgacgtggccggtccgcacgctggcctcggccgaatgcacctggttccactccaggcgcacaatttcctccactgcctctaccgcgaagccctgcgtcgaacgtgcatattccgtcaccagcaggatgcccaggccgctgcgcggcttgcagcccaccagccggggcaggtcgatcaccgggatcacctggccgcggatatccgccatgcccaggatcgacgggtcggcccccaccacggtcgtcacgtgcggcatcaccaggatctcgcgcaccttgaagacattgatcccgaacagctccgtctggccggaatgctcggcttcgccaagccggaacagcagcagctcgaactggttgttgttggtcaggttggtccgttcgtcgatgtccctcatggaactgctcatgctgcgctcccgtgccgtgcgtgtggtttttaccgccgtcgttgtcatcagcctgcggccgcggcggatggcggacggcagggttcatgactggatatcggcgcggggcaacgggagttgagaggcgcacgcagcgcgtgttcggatttcatccttgcatatccggattgcttcgttcctccggcgcagcgtcgtccatatagtggttcccaacttgtcataacacgctatgtcgatccccatgacgacccggaccaacgtggtacccgtccccgccgccgcagccatgccggcaccgatcccgctgccgctctatacgcaaatcaaggacgccttgcgcgccagcatcctggacggcacctatccgccgcaccaccagatgccgtcggaaagcgagctgggcgagcgctttcgcgccagccgcatcaccgtgcgccaggcgctgggcgacctgcagaaggaggggctgatcttcaagatccatggcaagggcaccttcgtctccaagccccgcgccttccagaacgtgacttcgctgcaaggctttgccgaggccatgtcgagcatgggctacgagatcctgaaccagatacgcaactgcaaatgcgtacctgccagccgtcacgttgccacgcaactgcggctgcgcgaaggcgatccggtggtggagatccggcgcgtgcgcctgctcaaccgcgagccggtgtcgctggagctgacctgggtgtccgaggccgtcggccgccgcctgctcactgccgacctggccacgcgcgacatcttcctgatcctggaaaacgactgtggcgtgaagctcggccatgccgacctgagtgtcgacgccatcctcgccgacgacgagctgacccaggccctgcgcatcgaggaaggcgcgccggtgctgcgcatcgaacgcctgacccatgacgcgcaaggcacgcctatcgattacgagttcctctacttccgcggcgacgcgttccagtaccggctgcgcgcagaccggcacaagaccgcgccagccgccagcgtcaccagcccagccggccatgcacggccccgcaaaccagccagcaaggggaagccctccgcatgaataccctgactcacgaatacgacatcgttgtcgtcggcggcggcaccgccggcccgatggccgcgatcaaggccaaggaacgcaaccccgcgctgcgcgtgctgctgctcgacaaggcgcacgtcaagcgcagcggcgccatctcgatgggcatggacgggctgaacaatgccgtgatccccggccacgccacgcccgagcagtacacccgcgagatcaccgtggccaacgacggcatcgtcgaccagtccaccgtttatgcctacgcgcgccacagctttgccaccatcgagcagctggatcgctggggcgtcaggttcgagaaggacgagaccggcgactacgcagtgaagaaggtccatcacatgggctcctatgtgctgccgatgccggaaggacacaacgtcaagaaggtgctgtaccgccagctcaagcgcgcgcgggtagagatcaccaaccgcatcgtcgccacgcgcgtgctgaccgacgccagcggcgccgccggcggcgtgatgggcttcgactgccgcagcgcggacttccacgtgatccgcgcgcgcgccgtgatcctgtgctgcggcgcggccggccgcctgggcctgcccgcttccggctacctgatgggcacctacgagaacccgaccaatgccggcgacggctatgccatggcctatcacgccggcgccgcgctggccaacctggagtgcttccagatcaatccgctgatcaaggactacaacggcccggcctgcgcctacgtgaccggcccgctgggcggctataccgccaacggcaagggcgagcgctttatcgaatgcgactactggagcggccagatgatgtgggagttctaccaggagctccagggcggcaacggcccggtgttcctgaagcttgaccacctggcggaagaaaccatccagaccatcgagacgatcctgcacaccaacgaacggcccagccgcggccagttccacgccgggcgcggcaccgactaccgcaggcagatggtggagatgcatatctcggagatcggcttctgcagcggccacagcgcttccggcgtgcatgtgaacgagcgcgccgagactaccgtgccgggcctgtacgcggccggagacatggccgccgtgccgcacaactacatgctgggcgccttcacctatggctggtttgccgggcacaacgcggccgactacgtcgccggccgcggcctgcctgaagccgatgcggcccaggtcgaggcggagcgcgcgcgcgtgttcgcaccgctggcgcgcgagagtgggctgccgcccgcccaggtggaatacaagctgcgccgcatggtcaacgactacctgcagccgcccaaggtcacgcgcaagatggaaatcggcctgcagcgttttgacgccatcgccgaggacatcggccagatccgcgccgccaatccgcacgagctgatgcgcgcggtcgaggtgatggcgatccgcgactgcgccgagatggcggcacgcgcctccctgttccgcaccgagagccgctggggtctctaccaccatcgcgtcgactatccgcagcgcaatgatgcggactggttctgccatacgcacctgagcaaggatgaagccgggcgcatggtcagccacaagcgcgcgatcgagccgtacatcgtcccggtggcaggcgacgacgccaccgcctaccagcggctgcgcgtcagccgcggccaggccgccgccacggccgccactgccgaacccgccaccctggctgccgcctgaaggaacccacgccatggcctacaccccgcatgagatcgcccagcgcagcagcgcgccggtcaccatcgatgaagacaagtgcattgccgacaagggctgcacggtctgcgtcgatgtctgcccgatggacctgctggccatcgacctgaccaaaggcaaggcattcatgcagttcgacgagtgctggtactgcatgccctgcgagaaggattgcccgacgggcgcggtcagggtcgagatcccgtacctgctgcgttgattgccccgcttcatgacaacagcaccacagagataaccccatgaaagcctccaccagcatccacctgctgctggcactggccgccgccagcctggccggcacggccagtgccgaaaccatccgcgttgccatcggcacgcaggacaccaccatcaactgcgccaccggcggcctgctgatccgcgaactgaagctgctcgacaagtacctgccccgcaccggcaagtacaaggacgtcacctacgacgtgcaatggaagaacttcacctccggcccgccgctgaccaacgagatggtggccgacaagctggatatcggcgccatggcggatttccccggctcgctcaatgccgctgccttccagaaggccggcaagaagagcctgttcatcgcgccgctgtcgggcaacgcgatcggcaccggcaacggcatcgtggtgccggcggattcgccggtccagtcgctggcggagctcaggggcaagaccatctcggtgccgttcggctccaccgcgcacggcatgctgctgcgcgcgatcaagcgccagggctgggacccggacaaggacgtgaccctggtgtcgcagtcgcccgaggtcggcggctcggcgctgcaggcacacaaggtggacggccatgccaacttcgtgcccttccccgagctctttgtcttccgcggctttgcccgcaagatctatgacggcgcccaggccgaggcccccaccttccacggcgcgctggtgaacgcggaatacgcgcagaagtacccggagatcgtggtggcctacctgcgcgccgcgatcgaggccgaccgcctgatggcggcggagcccgagaaatacagcgagctgattgcccgggtgaccggcatcgacgccgaggtggactacctgttccatggcccgctcggcctgcagaaccgcgactacacctggaagccggagtaccgccaggcgctgcagacctcgatcgagacgctgaagctgctcaagcgcaccgatgccgacctcagcgccgacaccgtgatcgacgagcgctacatccgcgaagccttcaggctggaggggctggactatgaagcgcgcctgaagtcctacgacaaacagcccctcgcggcgaaggacgcgggcagcggcaaacccatcgccgagccgaagctggccgcgcagctgtggctgcggggcgagtccagggtgcgcgcctatgcctcgccggctgcagcattcgccgcgctcaggcaggctgcaaaagagggcaagcaggcgcgcgtgctgtatgtgcatgaccgcaataccggcctgaagctgctggccagcaaggcgtggtacgtgcaggacggcaaggggcaggcgagcgccttcctgctcaagggctcagcggatggctgggcaaaggccaatggtggcaatgtgcgggactttgccgcagtcagcggcgccgcggtcgccgtggccagcaactgacgcggagcgcgcccatgacctcgatcagccttgaagcgggggcgcccccggtggcaccggccgcgccgggcgcggcacgcgtgcggctggcacgctggctggtgcgcctggccgcgctggccagctgcatcgtgctgtggcagctggcctcgtcccaccgggcccacctcggcctcgtcaccttcgccaacgtgcccgcgcccagcgacgtggttccggcggcctggcaactgctgcagtcacccaagctggtgctgcacctgagcaacagcctgtaccgcgtgtttgccggctttggcgcggcggccgtggctggcatcgtgctcggcatggcgatcggccgctcgcgctggctggaagacctgctgctgccaccgctggaggtgctgcgcccgatccccggcgtggcgtggattccgctggcaatcctgatgttcccgtcttcggagctgagcatgatcttcatcaccttcatcggggcgctgttcccgatcctgctcaacaccatccacggcgtggagcgcaccgacccgcgcctggtcgccacggcgcgcagcctgggcgcgcgccgctggaccgtcttccccgaggtgctgctgcccgcggcgctgccgagtatcgtcaccgggctggcgatcggcatgggcacgtcctggttctgcctggtcaccgccgagatgatcgccggccagtacggcatcggctactacacgtgggaggcctacaacctgcagaactatgcagacatcgtcgtcggcatgctcctgatcggtgccttcggcatgggcagcagcgcgctgatcaagcgcctcggcgcgtggctgatgccgtggacccgcctgcagcaggtgcgcgcatgacgagccaaccgatccgcgcgggccacctgcaggtgcgcggcctggatgtggcgctgggccagggcgatgccgccttcaccgccgtgcaccagctatccatcgacattcccgccgggcagttcgtctgcatcctggggccgtcgggctgcggcaagtccacgctgctgggcgccatcgccggacacctgccggcggcggcgggcgagatcctgctcgacggggcgccggtgcgcggccccgcgccggagcgcgggctggtgttccagcagcactcgctgttcccgtggaagcgcgtgctcgacaacgtcgccttcggcctgaagatgcagggcgtgcccaccgccgagcgcaagcgcgaggcgcaggccctgctggacctggtcggcctgggcggcttcgcgcagcgctaccccgcccagctttccggcggcatgcagcagcgcgcggagattgcgcgcgtgctgatcaaccggccgcgcgtgctgctgatggacgagcccttcggtgcgctcgacgcgcagacccgcgcccatatgcaagccctgctgctcgaggtctgggcgcggatgcgcaccaccgtggtcttcgtcacccatgacatcgacgaggcgctgttcctggccgaccgcgtgctggtgatgtcgccacggcccggacgcatccttgaagatatcgctatccccttcgagcggccccgccgcgccgagttgatgaccgatgacgatttcatccggctcaagcgccgctgccgcgacctgctgcacgaccacacccaggccagcgcgctcgcgaccgccgcctgaccgctatcgacctgactgccatccatgccgcaagcttccaccctgcctgacgaatccctgtttgatctcgatccctccatcggcgcgctgacgctgcgcctggccgaccccgaccctgcggtgcgacgcgtggccgtgctgcaacttgccgacctggaggatgaagacggcgtgccgctgctgctgcagcgcctgcaatcggaccctgccgaatccgtgcgcgcggaagccgcgcgcacgctggccagctgggaacaggaagcggtcgtcccggcgctggccgcggcactggccgaccccagccgcgaagtggccgaagcggcagcacagggactgtcggaactgaaggcgcccgcctccggtgccgccctgctgccgtgggtcacgcacggcgatccctttgtccgggcggccgcgtggcgcggcctgcgcgagctgcgctatgcggccggcttcgatgcggccatggcggcgctgtccgacgcggccgccccggtgcgccgcgaagccgtggccgtgctgggctggctcaggcgcagcgaagccctgcccgcgctggcacaagctgcgaccagcgatgccgataccgacgtcaggcgcgccgccgccggcgcgctcggcctggctgccgacccgtcggcgcgcgatgcgttgctggcggccctgcgcgacggcgcctggcaggtgcgggaagaagccgcgcagacgctgggaaaactgaaattccctgaagccgtgggcccgttgatcgacgcgctggaggaccgctactggcaggtccgcctgcaggccgccagggctctcggcaagctgcgcgaccgcgcggcgctggtgccgctgacgatgcagctggcccacgccatcagcaacctgcgcaaggaggccgcgctgtcgctggggagcctgcgggatgcggcagccgtgccggcccttgcctcggccgccgacgatgccgatccggaggtacgcaaggccgtacgcattgcgctggcgcagatcggcgcgccggaggctcatgcatgagcggcggcatggtcgtacccacgcgcctggagctctcccgcgccaacggcgcgctgcgcgtctactggccagacggccagtgccagtcgctggacccgggccgcttgcgcgcagcctgccgttgcgccgcctgccgcggcaagccctcggaggccgggccgggcgacacgcaaatcgtcgccctcggcgaaatgggctatggtgtgcagatcgtgttcagcgacgggcacgaccgcggcatctacccgtggccgtacctgcaggcgctgtagccgggcgcttacccgcccgccagcgcctgcaggatatgcacctcgtcggtttccttcaatggcgcgtccagccgcatcagctgcgtgcggttgacgaagacgcggatatacggccgcagcttgccctgctcatcgacgatgcgaaagcgcatgccggggaactggcggtcaaggtcgtcgagcagctcggcgatgctggcgccacgggcctcgacgtattcgcgctgtccggtataggagaagagcggcgtcgcgatacggacctgcatggaagttctccggtcggctgatggcattcaggcagggcgcgccacggtaaccgcgtagacctgcggcaggttgcgggcgatgcattgccagccctcgccttcatcggcactggcccagatctcgccgccggtggtgccgaagtacacgcccaccggcgcgtggccgtcggtggccatggcctggcgcttgaccgtgaaccagccttgttcggcgggcaggccgcggtcctggcgctgccaggtttcgccggcatcgcgcgtgacatacgctgccgggcggccgcccgggctgacgcgcggccagacgtcgctgccatccatcgggaacacccagaccgtgcgcggatcgcggcagtgggcgacgatggggaagccgatatcgcccacttccgccggcatggcttcgccgatgcgtttccacacgccttcgcggcggtccatgcggtagatgccgcaatggttctgctggtacaggatgtccgggtcggcgggatgctgcagcatgcagtgcggatcctggccgtactcgggattgggatcgggcaggaaggtggcgaggctgccgcggttcagcggcttccagtccgcgccgccgtcggtgctctcgaacacgccgccgctggacatgccgatatacaggtggcgcgcgtcgcgcggatcgaccagcacggaatgcatcttggggccgtcgggcgtgccgtcctgctcgccgccggtccaggtgcgccagttcgggtggtcgttgaagcctgataccggctcccaggtcacgccgtggtcggcgctgcggaacaggccctgcggcgaggtgccggcataccaggtgccgggctcgctggcatggccgggcgtgagccagaacacgtggtcgacgacgcggccggtctcgccctccggggccttgtcgaaggcgggcgggcgcgcggcttcggtccagttgcggccgccgtcggtggagcggaacacggtcgggcccaggtggccggtgcgcgccgccatcagcatgcgcgacggttcacgcgggtcctgcacgatatggtggatggtatggccgaggaacgtcgggccctcgatctgccagctgcggcgcgcggcgtcgctggtcaggaaccaggcgcccttggtggtggccaccagcagcctgacggggccggtgtcggtttcgggtgtgggggaagtcgtcatcttggctcctgcaagaaggccggtgaacgatgctttctgagtctagtacatgtagacagtgttcacaattaaagatggcagagctgtggccggcaggccggccacagccaccatgattacgaagtagcacggagttaaaagcggaagcccgcaacttgcctggacattgcgcgcgaagtgtggcataagcaatgttcccccgatgctttcgcgccccgacacccatgcttcgcactgtccgcttcgccaccctgaaccgcccggccctgccggcggcaggcgtgcgcgccacgcagcgcccgggcgccgccatcgacctggccgaccgcttccacgcgtacgcccaggtccgccgcgccgtgcttttcctggccgtgcgggcagctcggggcgccaccctccagtcctgagctttcccgcacggcccatgtcgcggatgccatccggcacccgcttgatcatgcagccaggagaaagccagacatgtccccgctctaccgccataccttctgcgccatggtggcgcttgccgccctctacctgatcctcaatccctgagccccagtggagtcttgccatggtgaatttccatgccctgcgcctgccggcgccggccctgccgcgcgcgctcgaactgcgcatcgacgttgagctcgcgccgggcgatatcgagcgcgagctgggtgccctgcacgaccgcatcggccaacccggcgactgcctgcatgcgatgccggcgctgcccgcgggcgcgccaggcctgcgcctgcgctatcgcgaggccgacggcgagtactacgtgtatgtggaagatgtgatgcagcgccggctggccggttataccgtcttcaaccggctgatcgaggtcggccgccgggccgacccatgggtacgggcgccgcacacaaagtttgcgcccgcttaccagcgccgcggcctggctcgggcgctgtaccgctgggcgctggatggcgggctgtgcctgctgagcggggcgcgccagtcggccggcgccaacgccctatggcaggcgctggccgccgattacccgatgggctatgtggacttgcgccacaagacgctgacctggctgggccaggccgtcgacgcgccagtgcgtgagggcctgcatacgcgcatgctgctgctcgggcgcggctggaccctggacgcgttcatggcccgcaccggcatgtactgaggcagcgcgcccgcttacagccagcggatcggcgcggcctcgcgtgcgttggctacgtacagggtccagccctgggcaaagtaggcgcgcacccgcgcggccagcgattggccgccgcccacgcgggcgtagtaggcaacatcgcgtgccggctgggcggcgggcttcgatgccttggcttgggcgggctggcgatagagggtgtcggcgagtacttgcatggcgaatatcctttccggttggatggaagttggtgcgcctcacgaggcacatccagccgtggttcggcccggatcgggaggcagttcagggttatccctagtatagagaagttgcgcctgaatcatccgggtctgtacctataggccgtatatggggtgcgtgataatggccgcctgccgcacgcgccacctgatgccaatccgccaatccaaggtgcccaatcgtcacattcgatattcctcgatgcacatgccgcgcattgcctgccggtgatgatgcatggcgcgtggtcacctagccttcagccttgcccggatcgcgcccgcagaggcaccgacaagcggcacaccgataacagcgggttggccaggtttgcgcctccagcccagaccagaaccacgtgagacacgcctgacgacagtccgtacgacggacgttgcagcgcccgcaaggagacagctcatcatgatcgaacagccctatccgtcgtccgcgacggaagccgatgctgcacgcccccaagtccccgaagtccggagccggatcgacgcgtttttcgagatcaccgcgcgcggcagcacccagcgcaaggaagtggtcgccggggtgaccaccttcatggcgatggtctacgccgtctttgtcgttcccggcatgctgggcaaggccggcttcgacaccagcgcggtctttgtcgcggtgtgcctgaccaccgccttcggctccctgctgatgggcctgtgggccaagctgccgatcgccatcggctgcgccatctcgctgaccgcattcatggcctttgggctggtgctggggcagggcctgtcgccggcggtcgcgctcggcgccgtgttcctgatgggcgtgatcttcaccgcgatctccgtcaccggcgtgcgctcctggatcctgcgcaacctgcccgccggcgtggcgcacggcaccggcatcggcatcggcctgttcctgctgttgatcgcctcgaatgaagtcggcctggtggtcaagaacgctcaccccggcctgccggtgtcactgggcaagatcacctcgttcccggtggtgatgtcggtgctgggcctggccgcgatcttcggcctggagcgccgcaaggtgccgggcggcatcctgctggtgatcatcgcgatctccgcgctgggcctggccttcgacccggcggtgaagttcaccggcgtgttcgcgctgccgtcgctgagcgcacccggccatgaatcgctgatcggcgccatggacgtgcgcggcgcgctgacggcagcagtgctgccgagcgtgctggccctggtgatgaccgcggtgttcgatgccaccggcacgatccgcgcggtcgccggacaagccggccagctcaacgctgccggccatatccacaatggcgggcgcgcgctgaccgcggattcggtcagctcgatcttctcggggatgttcggcggcgctccggctgcagcctacatcgagtcgaccgtcggcgttgcggccggcgccaagaccggcctgaccgccgtggtggtgggcctgctgttcgttgcggtgatgttcttctcgccgctggccgggctggtgccgtcgtacgccaccgcgcccgcgctgatgtacgtgggcctgctgatgctgtcgagcgtgagccgcctgcacatggacgacctggtcgacgcgatggctggcctggtctgcgccgtgttcatcgtgctgacctgcaatatcgtgaccggcatcatgctgggcttctgcaccctggtggtgggccgcgtggtggctggcgaatggcgcaagctcaatgtcggcacggtggccatcgcggtcgtgctggctgcgttctatgccgggggctgggccatctgatcctgccgaaagctactgccgcgtcccgggcgccacgcccgggacgctgacaaccagatgtctcctccaccgtgatccaggtggatttcaagcccgggcttcctgctttcccgggctgtttttttggtggcttgcctgaaaggtcccgcgcttggcgaatggcgtttcgctaaatcgccttcattgcccggcctgcattgccgccacatccatgtacaccagttcccagacatggccatcgggatcctggaatccatgcccgtacatgaatcccaaatccatcggcggcttgtaggtattgccacccgccgcgaccgcggcattgaccatttcatccacgcgcgcgcgggtttccatcgacaggcaaaccagcacctcagtcgatttccgtgcatcgcagatttcattgggcgagaagctgcggaacttggcttcggtcagcagcatcacgaaaatgttttcgccgacgatcatgcaggtggcagtgtcgtcggtaaattgcggattgaaggaaaaacccaactgcgtaaagaaggcaatcgacttttgcaggtcgcggacgggcaaattgacaaaaatctgctggctcatcaggggctccggtagtcgtgtcagagggggctgcgccgggcgcagacaagcagtctaggcgctaaaggccgggggcgtgcgtattttcattgtccttaaatgcgggcaaaacgggcgatgcccagcccaataccggctgcatcgtgggctgtgcgaccgtcaattcaggccagcaaacaatcagtccgtgcaatctccgttattttttgtaaaatttttttaggtgaaccgacaccacacttctagtaccatgcagcggcctatttgcagaaaggggatataaatggcgacatacaagcaactcctggctgagaaggaagcgctggaagccaagctgaatgaagtgcgtgcgacggaagtcgccggcgtgatcgacaaaatccgggacctgatgactgaatacggcctgaccgccgaagacatcctgccgcgccgcaagcgtggccgcccggctggttcgagtgccaagaagcccgcatccgccttgccgccgaagtacatggaccccaagaccggcaagacctggtcgggccgcggccgcgcgccggcatggttgggcaagcgcccggagcgtttcctgatcgagcagtaagccgccagcgcggccagcgcgcgcccgtctcacgcgcccgcttcaatcgatggtgccatcggcctgccgggcgcgtcactgcgcctggcagacatactccttgcgcagcgccctgaagccctgctgggtcggctccgccgtcaggcgcgcgccgccaccggccagcggctgcatgcgcaatacctgcgccgagcactggctcgcggtttcgtcccgctggtagcggatctcatactggccgccggcaaccggcacgaatgacacgcccgccgcgcaacgcagctcgggcagcggcggcgccgcggccgaggtcaccgccacgtagatgcgccggcccgcctccaccagccgctcgcgcgtgcgagccggcggctcgggcgagcgcccggccatgtccaggctccggtcccgacccatcgcagacaactgcctgccggttcccgccagcaccagcggccgcgcgggcaccgggcatttggccggatcgaccacggtgaacgaagtgttgtcgtcggtgctggtcagcagccgcacgctggcggccggggcgccggcaggcacccggtattgcgccacgcagccggacagcgccacggcggcggcaagcatcggcaacaaggcaagacgaggcaggactgcggacgaccggtcatggcgcatggcggcgggcaggtagaacgattgggccaacagcggacgttggcggcacgatggcggcaaatccggcagggatgccacacgatgacggcgcggccaggcaacacgccgcgccctcaaaccaaccagcatacctgcatccggcgcttggcggcagccgcataaacccatgttgaaaacctgcgtgtgatatccacagaatctgtggatatcctggccctacattccccgaaagccccggtctgtgcggcaacccaccggagcgcccaaattttaggcaacgggttgcaggcgcgccggaacccggcaacggtgcggcacccccgccgccagcacgccgttgcgctgcccaggccacacttcatccccccgcactcccttgaagggggcaccggcaccgcgtaatctcagtgttaccgggggctgcactggcgcacttgcgccaacttgccagccagataatgacaatgacacaacaagagcctatccaggccgggccgttgcctcgtgacctgctgcacgcactgcgtgacggcggctacgacgtatcgggactcgcgcctgccccggaatccgacaccgactccgaccccagcgacctcaggcccgccatgccggcggccggcccgcaacaggcctgccacgtgctctgcgcggtctaccgtgccaccggcgatccaaccatcggcctgtggctgggcagccggatgcagaccgacctgctcgggctggcgggcctgacggccatggccgggccgtcgctgggcaccgcgctgcggcgcatcgcgcgctaccagaagctgctcgccggcgaccgcatcgaactgcgccgccagggcgacgaagcctgggtctgtatccgcccgagcgatcccgaggcgcccgacacccgaccgcgcatcgacatggagctgtgctcgctgctggccttcgggcgccagttcacgcgcaagccgctgcatccgctgcgggtgtcgctgcgcatcggccagccggactggcacctgcgctataccgaagcattcgactgcccggtgcgctttggcgagcccgaagacgccatcgtgttcggccgccgcaacctggccttgcgcctggctgcccgcgtgcgcagcggaccggccggcgcgggcgcgggccatgccgcgcgcgaagcgcggccggcgtccgcgtcgctggacgatgtgcgcgcggccctgcaggcgctggccggcgaccgcgccctcagcctggccgcggtggcacgccacctggacatcagcgagcgcacgctgcagcgccggctgatggcggcgggcacgagtttccgcacgctgtgtgaagaggcgcgccgcgagctggctggcggctacctggccggaggcgcgatgtcgctcggagaaatcgcgttccggctcggctttgacgatgccaactcgttcttccgcgccttccgccgctggaccggcatgaccccgggcgactaccggcgcgcggcggcgcctccacccgcgtagggcaggccggctcacccgccgtggggttgctcccacggcgggttgtcgccgaagcgcccggccaggaaatcgacaaaggcgcgcacgcgcgggggcaccagccgccgctgcggcatcacggcgtagatgccggtgtcggcgagcgggtaatcgggcagcacctgcaccagccgcccggcgcgcaggtcggcgcagacatgccaggtggaatgcagggcgatgccaaagcccgccagcgccgcatcggacaacagctcgccggtattggcctcgatccggccgcgcacgcgcacggcaatctccccgccggcgccgtcgcccaggcgccagacatcctgccggccctggctgcccaccagcaccaggcaatcgtgccgcgccaggtcctgcggggtgcgcggcgtgccgcgccggcgcaggtagtccggcgcggcacacagcagccgccggttgttggccagccgccgcgcgaccagcgtcgaatcgtccagcacaccgatgcggatggccaggtcgaaacccgcgctgaccaggtccagcacgttgtcggtcaggttgacgctgagcgtcaggccgggatgcagcgccaggaattccggcaacagcggcgagatatagagccgcccgaacgaggacgacgtggtcacccgcagcgtgcccgataccccggtgccggcctgccgcaacgaggtgcccagcgcttctaggtcgtccaccagcgcacgcccctgctcggccagcaccacgccttccggggtggcgtgcagccgccgcgtggtgcgatgcagcaggcgcacgcccagttcacgctccagccgctgcagccgctggctggccaccgccaccgacaggtccaggctgcgtgccgcggcgctgatcgaacccaggtcgagcacgcgcaggaacaggccgatatcgccgatccggtccatgattttcaagattccattgaaactgattatggatcatgccggtttttactgaagacggaaaggcacagactgcgggcttccttccttttgccgacgcatcccccgaacatggcccccccagtctccaccaactccacacccggcgctgcatccgcccgcggccggctgccggttgcgctctacgcgctcaccgccggttccttcggcatcggctgcgccgaattcgtgatcatgggcctgctgcttcaggttgccgccgacctgcgggtgaccatcgccgccgccggcatgctggtgtccggctacgcgctgggcgtcttcgccggcgcgccggtgctgaccctgctgacgcggcgcatgccgcgcaaggccgtgctgctggcgctgatggtgatctacaccgtcggcaatgccgcctgcgcgctggcgcccgactacaccacgctgatgatcgcgcgcgtgctgacctcgctcacgcatggcaccttcttcggcgtcggcgcggtggtggccaccgggctggtgccggaggaccgccgcgcctccgcgatctcggtgatgttctccggcctgacgctggccacgctgctgggcatgcccgccggcgcctggctgggcctgcacctgggctggcgctcgaccttctgggcgatgaccgtgatcgggctgctgtcgctggcggtgatcgcgctgctggtgcagaagagccaggaccacggcgcccccgtggccctgcgcgacgaactggccaccatcggccgcccgcaggtgctgctgggcctgttgatgacggtgctgcagtcgatgggcatctttgccgtgatcacctacgtgcagccgctgctgacgcgcgtgtccggctttggcgaggcggcggtgtcaccgatcctgctgctgttcggcgccggcatgatccttggcaacgtgctcggcggccgctttgccgaccgcaccccgacgcgcgcggtgctggccacgctgaccacgctgacgctggtgctggcggcgatgacgctggccatccacagccaggtgctggtggtggccttcgtcggcatcctgggcatcgcggcctttgccacggtctcgccgctgcagctgcgcgtgctgcgccacgcccagggcgcgggacagaacctggcctcgagcttcaatatcgcggcattcaacctgggcaacggcctgggtgcgtggatgggcggcgtggtggtcgatcacggaccgggtctggcggcattgccgtgggttgcggcactggcgccgatggctgcgctgggggtggcgctattcagtgtgcggctggaactggggtcagcgaaagtagcgccgattccggaatcgatttgacgtttcgcggaacttagaccacaagtctcagcgtcatgtcatcggcccgttggttggcgcccgcgcggtaatgctcattcatcctccggcgaggattccagctgttctaacgttggcagcgccccgtgcaaatcttcgggcagcgtttccgtcattcgcacaatgtagtcgaggcaatagtgcaacaacctgttgcactattgcctcgtctggccaggctgcagcgaacgtccgaatgtatttcaggcttcgcgatgaaaaaccagccatctcggggaacgattgacgcaaatcgcccgcaagcctgtcgatcacctttgtcccccagcctgctgctgtctgctgcgggagaatcgaacgcccaagcctccagtagagcaggatcagttcgcggtttactgaaagcgacgcggcaaggcgagtacggtggacttcttccttgagacggcccagccaagcggcatattcggcagcgccgggcatggcattacgctgcgatgcgagacgtttcgacatggcggccattctttcatggcgccacagcggcctgtagggcaagacgcagaaatcagactactccactcactcagccaggcttgccatcgacccgccgccgaatcaggcgcggcgcatacgccagcgcatagaggccgaacccggtcacccagcacgccccggctccccacacccaatgcaggtagccacccggccaggccatcggcccgaacacccgcaacaccgccgccgtggccaccagccagtacgccgcggtttccgcgcggccggccaccagcatgcggccggtgtgacccagtgcggtgcgcgtgatcatggcgatgatcgccacgccaagcacgccgacagtgaaggcatgcgtcgccagccccgccatcaccagccccagcgcacccagcgcctgcagcagcagcgccaccggcagccacgcataggccaggtgcagcacccacaggatcggccggttgcctaccgcatggctgcgccagccagccacgcgcacggccagcaccgccgcggccagcaatgacagcgccgccgccagccagaccggcaagggcagcacccccgcagccagtcccagcaccgcggccggcaccaccatgcgctccacctgccggtattgccgcaggcggaaccccgggatcgcgttggtcgtgaacatcgggatgacgcgcccgccgatcaccaccacgaacagcgtgaccagcgccacgcccgcgcggcaggccagcatcgcaccggcgtcatggccgcgcgcctgcagccacaggctggcgacatcggccgcgcccagcagccacagcgccagggccagcggatagttgcggcggttgccggcgcgggccagcgtgcgcgtgaaggccagcgcggccagcggcaggaacgcgccctcgatcacgaaggccgccgttcccggcaccacccacatgcccacgcgcccggccagccacagcaggaacagcgcggcaagcgcggcgccagtgggcgtcggctggccggtccaggcccgccccgcggtgaacaggaaacccaccacgatggccgcggcaaagccgaacaccatctcgtgcgcgtgccagaacatcgccggcatcaccggcgccgggccgactgcggcggcgcccgccagcatcgccgaccacgccgcgatggccagcgcggcgaacaccgccccgcccaggtagaacggccggaagcccagtgcaaacaaggcaaagccgcgcggcggcggtccggcgggcgccttgccaggcggtggcgagcgccgcgcgggaagaatgggaatggtgtccatggctggctacgggaatcgggtggtgcggcgcgcgccggcttcttgatccggcgcacggtctgccgcaggtgcgcaaacggatgccattcacgctgactgcacgatagcaccgccgccgcgccggcgacctccgccggtagaactacctccaaaggcaggctgcgcgcccgcgtgcgctgtacggccggcgaataggcagcaccagtggcggcccctactctggcatcacccccgccaaagttgacacaggagcatggccatggccacccacccacgcgcgccggagcccattgcgcccggcgccgcaatcacgctggcgtccagcactttcgccttcaccatctgctttgccgtctggatgctgttcgcggtcctcggcatcccgctcaagcaggagcttggcctgagcgacactgaattcggactgctggccgccacgcccgtcctcagcggctcgctgatccgggtgccgctgggcatctggaccgaccgctacggcgggcgcatcgtcttcttcgtgctgatgctggccaccgtgatcccgatctggctgatctcgtatgcgcacacgctgtggcagctgctggtgctgggcttgttcgtcggcctggcgggcggctcgttctcggtcggcacgccgtatgtggcgcgctggttcccgcgctcgcgccagggcctggcgatgggcatcttcggcgccggcaactcgggcgcggcgctgaccaagttcgtcgcgccggcgatgatcctggccgccggcacctggaccgtggtgccgcgcgtgtattcggtggcgatgctggtcacagcgctgctgttctgggtgttctcgcgcagcaacccggcgcacctggtcaagtccagcgtcggctggcgcgagcagctcgccgtgatgcgcgacccgcgcgtgtggcgctactcgcagtactactcggtggtgttcggcggctatgtcggcctgtcgctgtggatgaccaagtactacatcggcgaatacggcttcgacatcaagaccgccgccttcctggccgcgtgcttctcgctgcccggcggcgtgctgcgcgccatcggcggctggatctccgaccgctacggcgcgcaccgcaccacctggtgggtgatgtgggtgagctgggtcggcttcttcctgctgagctacccgcagaccgatttcatcgtccagaccaccagcggcccgcagggttttcgcatcgcgctgacgcccacggtcttcaccttcctgctgttcgtggtcggcatcgcctttgccatcggcaaggcctcggtattcaagttcatctccaacgacttcacgcacaacatcggcgcggtttccggtgtggtcggcctggctggcgggctgggcggcttcgtgctgccggtgctgttcggcatgctggccgacctgaccggcgtgcgcagcagctgcttcatgctgatgtacggcaccgtgtgcgtgagcctggtgtggatgcactacagccagcgcgctgaacgccagcgcaaggcacaggccgtcggcctcacgcaggccgcctgagcgacggcccctgttacgcacaacaaccaaggcacactgtcatgtcctcttccgtactgacccgctgggagcccgagaataaggtcttctggaaaagccagggcgagcgcatcgcctaccgcaacctgtggatctcgatcccggcgctgatgctggccttcgtggtctggatgctgtggagcgtggtcgcggtcaacctcgaccgcgccggcttccagttcaccaagaaccagctgttctggctgaccgcgctgccggcgctgtccggcgccacgctgcgcatcttctattcgttcctggtgccggtgttcggcgggcggcgcttcaccgcgatctccaccgcactgctgctgatcccggcgctgggcatgggcttcgcgctgcgcgacccgtccaccggctatccgacgctgctggtgctggcgctgctgtgcgggctgggcggcgccaacttcagctcctcaatggccaatatcagcttcttcttccccaaggcgaagaaggggctggccaccgggctgaacgcgggcatcggcaacctcggcgtgtcggtggtgcagttcgtcacgccgctggtggtgtcgatcgcagtgttcggcgcgctcggcggcgagccgcagcagtacacggccaacggcgccacgcatgacctgtggctgcagaacgcgggctttgtctgggtgccgttcatcatcgtgtcggcactggcggcgtggttcggcatgcatgacatcgcggatgccaaggcatcgtttgccgagcaggcggtgatcttcaagcgcaagcacaactggctgatgtgctggctgtacgtgggcaccttcggttcgttcatcggcttctcggcggggctggcgctgctgaccaagtcgcagttccccggcgtcaatcccaccgcttatgccttcctggggccgctggtaggcgcgctgacgcgtcccgtgggtggctggacctccgacaagctgggcggcgcgcgggtcacgctgtggaccttcgtcggcatgatcgccgcggtgttcgcggtgctggcggcgctgccgcatgacggcgccggcggcaacttcacattcttcctggccgcctttatcgcgttgttcgcgctgaccggcatcggcaacggttcgaccttccgcatgattccggtgatcttcctgaccgagcgccagcgcgctgccgcgggcaagggcgacgcggcacagaagcaggcattgcaggacgccggcaaggaatccgccgcggtgctgggcttctccggtgcgatcggcgcctacggcggcttctttatccccaagagcttcggcacctcgctggagttgaccggcgccgccgacgccgcgctgtattgctttatcgccttctacctcagctgcgtgctggtgacttggtggcactacgcgcgccgcaacgcgcccatgccctgctgaccctgtcaccagtcccgccggccgggctagttcttccgaactagtcccgtgcccggcgcctagcccgatcgccatgcggcggctgttccaccagcgaattggctgccgcccgcctcccccataagctgagagtgtccctgcaaagctcctgaaaccaccggagcgcccgcagcaaagcactcgcggagaacaaagcaatgagtcatttcctggatcgactgaagttcatgtcgcgcgtcaagtccacctatgcggatggccacggcgcggtggtgaacgaagaccgcaagtgggaagacggctatcgcagccgctggcagcacgacaagatcgtgcgctcgacccacggcgtgaactgcaccggctcctgctcgtggaaggtctacgtgaagaatggcctgatcacgtgggaaacccagcagaccgactacccgcgcacgcgcccggacctgcccaaccatgagccgcgcggctgcccgcgcggggcctcgtacagctggtacgtctactccgcgcagcgcgtcaagtacccgatgatccgcggccgcctgatggagatgtggcgcgaggcccgcaagaccatggacccgatcgccgcgtgggaatcgatcagccaggatccgaagaaggccgcgcgctacaagagcgtgcgcggccagggcggcttcgtgcgcgccgactggaacaccgccaccgagatcatcgccgcggccaacgcctttaccgtgaagaaattcggcccggaccgcgtgatcggcttctcgccgatcccggccatgtcgatggtgtcgtatgccgccggcgcacgctacctgagcctgctcggcggcgcctgcctgtcgttctacgactggtactgcgacctgccgccggccagcccgcaagtgtggggggagcagaccgacgtgccggaatcggccgactggtacaactccacctacctgatggtgtggggctcgaacgtgccgcagacccgcacgcccgacgcgcacttctacaccgaggtccgctacaagggcaccaagaccgtggcggtgtcatccgacttcggcgagatggtcaagttcggcgacatctggctggcgccgaagcaaggcaccgacgccgcactggcgatggccatgggccacgtcgtgctgaaggaattccacgccagcggcaagtccgcctacttccgcgattacgtgaagcagtacaccgacatgccgatgctggtgctgctgcgtgacaaccagggcacgctggtgcccgaccacttcctgcgcgcctcgcacctggccgataacctcggcgaagccaaccatcccgagtggaagaccctgctggtcgacgacgccaccggcgagatcgtcgcgcccaacggctcgatcggcttccgctggggcgaaggcgcccacaacggcggcgagaagatcggccgctggaacctggagatgaaggacggcggcagcggccgcccggtcgagccgcgcctgtcgctgctcggcaaggaagacgaggtggtggaagtgggcttcccctacttcggcggcgaacacgatgaactgctgcgccgccgcgtgccggcacgccggctgacgctggccgatggcagcactgcgctggtggcgaccgtgtatgacctgcagatggccaactacggcgtggatcagggactcggcgggccgaacgtcgccgcctcgtacgacgatgacgtgccctacacccccgcctggcaggaaaagcacacctccgtcccggcccgcctggtgacgcaggttgcgcgcgaattcgccgacaacgccgaccgcacgcaaggcaagagcatggtcatcgttggtgccgcgctcaaccactggtaccacaacgacatgatctaccgcggcatcatcaacctgctgatgatgtgcggctgcatcggcaagagcggcggcggctgggcccactacgtcggccaggaaaagctgcgcccgcagttcggctgggccccgctcgccttcggcctggactggtcgcgcccgccgcgccagatgaacggtacttcgttcttctacaaccacaccagccagtggcgccacgagaagctggccgtcgacgagatcctgtcgccgactgccgaccgcaagcgctatgacggcctgtcgctgctggacctgaacgcgaagtccgaacggatgggctggctgccgtcggccccgcaactgggcaccaatccgctcgacgtggtcgatgcggccgagcgcgccggacaggacccggtcgcctacacggtcgagcaactgaagtccggcaagctgcagttcgcctgcgacgatcccgacaacccggccaacttcccgcgcaatatgttcgtgtggcgctccaacatcctgggcagctcgggcaaggggcatgagtacttcctgaagtacctgctgggcacgcagaacgccgtgttcggcgacgagaacgacgcgatcaagccaagcgaagtcaacgtgcgcccggccgccgaaggcaagctggacctgctgaccgtgctggatttccgcatgagcaccacctgcctttacggcgacatcgtgctgccgacggctacctggtacgagaaggacgacctcaacacgtccgacatgcacccgttcatccacccgctgtccgaagccgtgcagccgctgtgggaaagcaagaccgactgggagatctacaaggccatcgcgaagaaattcagcgagatcgccgggccctatctcggcacgcgcaaggacctggtgtgcacgccgctgctgcacgacaccccgggcgaactcggccagccgttcgaaccgaaggactggaaggccggcgagtgcgacctggtccccggcaagaccgcgccgtcgatgaccgtggtcgaacgcaactacgccgacatctacaagaaattcacctcgatcgggccgctgctggacaagctcggcaatggcggcaagggcatcaactggaacacccagcatgaagtcaaggagatcggccagctcagccacaccgtcaaggagcccggcgtcagccagggccgcccgcggctggagagcgcgatcgatgccgccgagatgatcctgaccttcgcgcccgagaccaacggccatgtcgccgtcaaggcatgggaggcgctgtcgaagatcaccggccgcgaccacacccacctggccgaaggccgcgagcacgacaagatccgcttccgcgacgtgcaggcgcagccgcgcaagatcatctccgcgccgacctggtcgggcctggaatcggaagaggtcagctacaacgccggctacaccaacgtgcacgagctgatcccctggcgcacgctgaccggccgccagcagttctggcaggaccaccgctggatgctggacttcggcgaaggcgcgtgcgtgtacaagccggccatcgacaccaagacggtggcgccgatgctgggcaagaagcccaacggcaacccggagctggtgctgaactggatcacgccgcaccagaagtggggcatccactccacctactcggacaacctgcgcatgctgacgctgtcgcgcggcggcccgcacgtgtggatctcggaaaccgaggccaaggcaaacggcatccgcgacaacgattgggtggaagtgttcaacgtcaacggcacgctgaccgcccgcgtggtggtgtcgcagcgcgtgcccaagggcatgtgtctgatgtaccacgcccaggaaaaaatcgtgaacgtgcccggcgccgagaccagcggcatgcgcggcggcatccataactcggtcacgcgcgccgtgaccaagcccactcacatgatcggcggctacgcgcagctggcctacggcttcaactactacggcaccgtgggcagcaaccgcgacgagttcgtgatcctgcgcaagatgaagagggtcgactggctggaagggccgctcgcggaaaagactaaggaaggagcctcgcaatgaagatccgtgcccaggtggccatggtgctgaacctcgacaagtgcatcggctgccatacctgctccgtgacctgcaagaacgtctggaccagccgcgacggtgtcgagtacgcgtggttcaacaacgtcgagaccaagcccggcatcggctaccccaaggaatgggagaaccaggacaagtggcagggtggctggaagcgcaacgccgacggcacgctggagccgcgccagggcggcaagctgaagatcctggcgaacctgttcgccaaccccaacctgccgcagatcgacgagtactacgagcccttcacctacgactacgagcacctgcagaaggcgccgctggtgcagaccccgcccaccgcgcgcccggtctcggtgctgacgggccgcaagatggagaagatcgagtggggcccgaactgggaagacgacctcggcggcgagttcagctcgcgcggtcgcgacaagctcttcgacgacgtgcagaaggagatgtactcgaccttcgagaacaccttcatgatgtacctgccgcgcctgtgcgagcactgcctgaacccggcctgcgtggcctcgtgcccgtcgggctcgatctacaagcgcgaggacgacggcatcgtgctggtcgaccaggacaagtgccgcggctggcgcatgtgcatctcgggctgcccgtacaagaagatctacttcaactggcagagcggcaaggccgagaagtgcctgttctgctatccgcgcatcgaggccggccagcccacggtctgctccgagacctgcgtcggccgcatccgctacctcggcgtgatgctgtacgacgccgaccgcatcgagcaggcggcgtcggtggccgatgagcgcgacctgtaccagtcgcagctcgacgtcttcctcgatccgcacgacccggcggtgcaggccgaggcgctgcgccagggcatcccgcaaacctggctcgatgccgcgcgcaagtcgccggtctacaagatggcatgcgagtggaagatcgccttcccgctgcacccggagtaccgcaccctgccgatggtctggtatgtcccgccgctgtcgccgatccagtccgcggccgaggccggccacatgggcatgaacggcgtgatcccggacgtgaagagcctgcgcatcccggtgaagtacctggccaacctgctgaccgcgggcgacgtgatgccggtactgtccgcgctggaccgcatgctggcgatgcgcgcctacaagcgctcgcaggtggtggacggcgtgcaggacctgggcgtgctggagcaggtgggcctgacgcccgcgcaggtcgaggacatgtaccagaccatggccatcgccaactacgaggaccgcttcgtgatcccgtcctcgcacaaggagatggtcgaggacagcttcaacgacaaggccagctgcggcttcaccttcggcaacggctgctcgggcggcgcctcggacggctcgctgttcggcaagaagccacagggcagcgtccacttcgccgacatgcccaagtcgcgcaagaaggcagtgatgagctgatgcctgccacgaaccgcacggagaacaacatgcccctctatcccatcctcagcgccctgctcggctatcccgagcaggaactgctcgacgccctgcccgagatcgatgccgcgctggccgaatggccgcaggcgtgcgagctgctggcccccgtgaccgggctgctgcgcggcgagtcgctgatcgcgctgcaggagaactacgtcgccaccttcgaccgcaacccggcgcactcgctgcacctgttcgagcacgtgcacggcgaaagccgcgaccgcggccaggccatggtcgacctgatcgacgaataccggcgcgaaggctttgaacccgccgcgtccgagctgcccgactacgtgccgctgttcctggagttcctcggcgcgctggtggccgacggcaaggaagcgcgcgccgagcaattgctgggcgacgcgatccacgtgctggccgcgatcggcgagcgcctggcgcgcaacgaaagcccgtacgccggcgtgttcgcggtgctgcgcacgctgaccgacgtgcagccgcaaccgcagcaggagccgccggtgcgggatatggatgaagcgctggagaccttcgggccgggggctgatggcgtggagccgttgctggcgccgcaaggcgggccgcaggcggtgaagttctatccgcgcgatccgcgtgtcagggcgcctatgccggctgcctgctgactcctcacgcggacccgcggtgttctcccctctcccgcttgcgggagaggggaacacagttggcaattgagacgaccgaacctgcctcaaaggcagctacagagcaaacaccatggcaaccctccaccaattcctctatggcatctatccgtacatcgctgccgccatcttcctgttcggcagcctggcccgcttcgagcgcgagcaatacacctggaagaccgacagctcgcaggtgctgtaccgcggcaacctgcgcaccggcaacatcctgttccacgtcggcatcctcggcctgttcttcggccacctggtcggcctgctgacgccggtggcagtgtggaatgcgctgggtgtctcgcacggcttcaagcaggccgtggcaatggccgcgggcggcgtgatgggcaccatgtgcctggccggactgctgatcctgctgcaccgccgcctgaccaacgcccgcgtgtcggccgtgacccgcaccggcgacaaggtgctgctgctgtggctgctggtgacgctgctgctgggcctgtccacgatcttcgaatccgccagccacatggacggccacatgatggtgcaactgatgacctgggcccagcacctcgtcacgctgcgcggcgacgccgccagctatatcgccgatgcgccgctgctgttcaaggcgcacctgttcatgggcatcacgctgttcgcgatcttcccgttcacgcggctggtgcatgtgtggagcggcttcgcctcggtcggctatctcggccgcgcctggcaactggtgcgcagccgctgagcgccgccacccgacaaggagaaacagcatgcctgtcaccgtcaacggcgtggaactgcgcgacgccgatatcgaacgcgagctggaccaccatcacgatgccgccaacccggcgcggctggccaccatctcggccatcctgcgccaactggtgcgcaccgaagccgaccgcatcggccttgccgccgaaggactggacgacgacgccctggcgctggccctgctggaacgcgaggccggcatccccgagcccgacgaagccagctgccgccgccactacgacagccgccccgagcgctttcgcgacggcgaatgggtcgaggccgaccatatcctgttccaggtcacgccgcgcgtgccgctggacgcgctgcgcgagatcgccgcgcagacgctggcactggtgcgcggcgatccttccacctttcccgagcacgcccgcgcgctgtccaactgcccgagcggcgccaacggcggccgccttggccgcgtgttccgcggcgagaccgcgccggaattcgagcgcgcgctgttcgcggcgcagcaggacggcgtgctgccgcatttgcttgaaacccgttatggcctgcatatcgtgcgcgtgctggaacgctgccccggcacgcgcctgcccttcgatgcggtgcgcggcgacattgcccgcgccctggccagtgccgcgcgcgaccgagcctggaagcagtacgccagcctgctgatcgggcgcgcgcgcatcgaaggcatcgagctggagggcgccgacagcccgctggtgcagtagcgcctggatgccgccatgcatcacatcgaacaactgctcaaaggtttcgaacgcttccagcaacgctatttcgacgacgagcccgggctgttcgacacgctgcgcaccggccagcgcccgcccacgctgctgatcggctgcagcgattcacgcgtcgatcctggcctgctgctgggctgcgatccgggcgagctctttaccgtgcgcaatatcggcaacctggtgccaccgtgcaccggccgccatgaaggcagcctgcacggcgtatgcgcggcgatccagtttgccgtgcagcagctgcgcgtggcccgcatcatcgtgatgggccacggcggctgcggcggcatccgcgccttgctggcgcagccggccgacgccggcgaccatgcgcccgacgaaagcgaagaccccgactacatcggcgcctgggtgcgcatcgcggcaccggcgcgcagacaggtggaggaagccctggccgcggccagcgccgccgagcgccagcgcgcctgcgaacaggcggcgatcctggtgtcgctgcgcaacctgcagactttcccgttcgtgcggcgcgcactggaggccggcacgctgacgctgcacggctggtatttcgacctgcaggccggcgcgctgctggcctattcgcagcgtgccgacagcttcctgccgctggtgtgcccgctgcccgcccaaactgaactccgcgaaccctgcgaaccctgaccccatgcatcccttcatccttggcattaccggcacctccggcagcggcaagaccacgctgatcacggcactgctgccgtggttccgcgcacagggcctgaccgtcaacgtgatcaagcacagccatcatccgctcgaactggagccgccgggcaaggacagcgcgcgctttcgcggcgccggcgcggccgaggtgatggtggcatcgccctatcgcttcgccatcgtgcgcgaactggccgacgaggccgagccgacgctggccgagcaggtggcgcgcctgcggccggccgatatcacgctggtggaaggcttccggcgcgaggcgattccgcgcatcgaggtctaccggccggcgcacgggcgcgcgccctactacccgggcgacccttcgatcgtcgcgctggccaccgacgcgcgcatggactcggtactgccttgcatggcccttgacgacattgcacaggtggggggcttcatcctcgccatgaaggacgaggcgggggcggcgagcgcggccgccgcgttcagtcgctcgcgcgacggtgcaacggccagatgacgttcacggcctcgccgtcgttgcggtaggcgtggcaggtgtccagtatccagggccggggtacgggctcgtctcccgccagcttggcatgccacggcgactgttcgcgctggaccgacatgatggtctgcatcgcggtggtggccagcggccccagcagctcggtcaggtgggtacagcccttggcgccccccaggcgcgccctggcctgctgccggaagccgccgccgatgcgcaggccctcgagctgccgataggcggcgttgatctccgcgcagtatggcgtcggtccggtctcggtgcgggcctcgaagcgccggatcaccaggtccgcgccgatcgtcatgcacaggcgcatctggtgaatgaagcccccgtcgggcacgctgacaaagggcagttcggtggcgtcggcggaaatatcatccatatcggcctcgatgtcatagaggccatcgtcgcgcagatagccgcggcattcgatctggcgggtgtgacgcagcgtgcgtccgggttggggcgtgggggctgtttccatgcgtgtttccgtcgggcttctggtattgccggtcatgatggacgctagcggcgccggaatcgccccccagtatcgggtggcgcggctccggtgccgcgcaggatcgccgccagatggctaccagctgctgtccgagctgcccgcgccggaggcacggtggctggcaaagtgttccagcaggaagtccaccagcgcccgcaccttgtccgggcgatggttgcgcgccgggaacaccaggtggatatccgcgggcgcgaactgccattggggcagcacccggcgcagggcgccgctgcgcaggggctccgcaacatcccactcggagcgcacgatcaggccctggccatcgagcgcccaggccagcgccgattccccgtcattggtgctcatggtgccgcggaccttgatggtctcctgctgcgcgccatggcgcaggtgccaggtgccgaaggtctcgtcggcttcgcggatgaagatgcagttgtgccgcgccagctcgcgcgggctcgatggctcgccccgcgcttccaggtaggacggcgcggcacagagcaggcggcggttgttggccagcaggcgcgccgtcaggcgcacgtccggcatctcgccaaagtggatcatggcgtccaggccctgctcgaccaggttcaggggccggtcggtcaggtagagctggacctcgatattcggacagcggcgcgagaaccccgacagcgccggcgcgatatgccgccgtccgaagccgagcgtggcgccgatcttcagcaagccgtgcggggtgctgccggtgcccgcgatcgatcgctccagcgcctccatctccgcgaggatccgcgctccctccaccagatagctctccccttccggcgtcaggctgatgcggcgcgtggtccggtgcagcaaccggacgcgcagccgtgcctccagccccgccagccgcttgctgacggcgggcggcgtcacgccaagctcctgcgcggcgccggtcaggctgccctgcttgttgatgcacgcaaagaacgcgacgtccgagaggttatccattggtgaataccaggaaacaaagaagtaactgagtttaaattatgtgcccataggtgaatgatacgatggtttccataacgattcctaaaccaggagacacccatgaaagttgcccacctcacggccttgctgctgtgtgccgcgtcgatcggcacggccgcggcgcagtcctatccccagcgcccggtgcgtctggtcgtgccgtacgccccgggcggcagtgccgacatcgccgcccgcctggtctcggatgcctggtcgaagagcctgggcggcaccatcgtggtcgagaaccgtgccggcgccggcggcaatatcggcgtcgatgccgtggccaaggccgccgccgacggctacaccatcggcctgcagacggtgtccctggccatcaacccgggtctgttcccgcgcatgccgtatgacacgctgaaggacctggccccgatcggcatggtcgccagttcgcagcacgtgctggtggtcaacaacaacgtgcccgccaggaacctgcaggaactgatcgccgctgccagggccacgccgggcaagctgacctacgggtccgcgggcaacggcagcaccttccatatgtcggccgagctgttcaagtcggtggccaacgtctccatcgtccacgtgccgtaccgcggcggcggcccggccctggtcgacaccatcgcgggccaggtcgacatgagcttcccggtgatctcggccgcgcagcagcatgtgcagggcggcaagctcaaggcgctcgccgtcaccggcagcaagcgcgcgccgcagttgcccaatgtgccgaccgcggccgaggcgggcctgcccggctatgccttcgagacctggttcatggtgtttgccccggccggcacgcccaggcccgtgatcgacaagctgaacgcggcgctgaacaccgcgctggccgcgcaggcaacccgtgagcgcatgctcaaggaaggcttcgagcccaccccgaccacgcccgaggccgcgcgccagcgcctggaaaaggagatgcccgtgtgggccaacctgatcaggcagcgcggcatcaccgcggaataacgacagacaaggcagttgccatgacccccaagacgctataccagaagctggtcgactcccataccgtggccaggctcgacgacgacaacgtgctgttgtactgcgacctgcacctgatgaacgagtacaccagcccgcaggccttcgccgggctgcatgaacaggaccgcggcgtgctggtgcccggacagaacgtctcggtggtcagccatatcatcccgacgcaccccaccgcgatccgcgtgatcgcggatccggcctcggcgctgcaggccaccaacctgcgtgccaactgcgagcggcacgcgatcccgctgttcgacaccaacgacacgctgcagggcatcgagcatgtgatcgcgcccgagcacggcatgatccggccgggcatggtggtgatctgcggcgacagccataccaccacctacggtgcgctcggcgcgctcggcttcggcatcggcacctccgaggtcgagcatgtgctggccacccagacgctggtctaccggatggccaggaccatgcgcatccgcgtggacggcaagctgcccgccgggaccaccgccaaggacctgatcctcaggatcatcggcgcgatcggcgcgcaaggtgcacgcggctatgtggtggagtactgcggatcggcgatccgcgacctgagcatcgaggcccgcttcacgctgtgcaatatgactgtggaggccgcggcgcgcggcgcgctgatcgcgccggacgcggtcgccacggactatgtgctgcgccgcgccgtggatatcgaaggcccgcagcgcgacgccgcgctcagctactgggcgactctccaaagcgatgcggacgccgtgttcgacatggacttcgtgttcgacgcaagcgagatcgagccctacgtcacctggggcaccagcccggaccaggtactgccggtttccggccagatcccgttcccggaagaccagctcgacgaggccgagcagcgctcggtcgagcgcgcgctggcgtacacgcacctgcaaccgggcgccgcgctggcaggcacgccgatccagcacgtcttcatcggctcctgcaccaacggccgcatcgaggacctgcgcgcggtggccagcgtggtgcgcggccgcaaggtggccgcgggggtcagagccatggtggtgcccgggtcgggcgcggtcaaggcccaggccgagcgcgagggcctggccgaagtcctcaccgccgccggctttgaatggcgacaaccgggctgctcgatgtgcctggccatgaacgacgacgtgctcgccgacggcgtgcgctgcgcttccaccaccaaccgcaatttcgagggccggcaggggcgcggtgccatcacccacctgatgagcccggccatggccgctgcggccgccgtcaccggcgtcatcaccgacgtccgcaagctggagatcacccatgcctgaacccacctgcatcgccggcaaaggcgccgccatccgcttcgagaacctcgataccgaccagatcatccccaagcagttcctgcgcgggatcgacaagtcggggctggccgagggcattctctacgaccaccgcttcgacgccagcggcgcgccgcgccctggcttcgtgctgaaccggcccgagtacgccggcgccagcatcctggtgagcggcgccaacttcggctgcggctccagccgcgagcacgccgtctggggcctgcagcaattcggcatccgcgccgtgattgcgccgagcttcggcgagatcttctattcgaacgcgatgaacaaccggctgctgctggtgatgctgccacgcgaggtgatcgggccgttgatgaacgacgtggatgcggacgcggccaacaccatcagcatcgatgtcgaggcgatgcgcgtgcgcacgccctccggcgactacgccttcgagctgtcggcacggcaccgccgcatgtttatcgaagggctggacatgatcggcctgtcgctgcggcagcgcggcgagatcgagcagttcatccagcaataccggagcgcgttcccgtggacaacgaacgtggccaggcgcacgcgcgaccgcctgagcgcgacctgaagcctgccctgcaagcgcgtcgcctccgcggcgcgcttgccccgctgcaaacgacaaggatcaacaccaccccacacttcgttcccgcaccgccgccaccgtttgatgccagtcaattccatgtcgtcagtgtgtccgcatgatttccacacgacgacaggtgcccgccacgcaggcatgggcaccgcgaaacagctttcctcaccgctgatccacggcacccatgaaagcaaaaaactggctgtacccggcaatcgcggcattgccgctctcactctggctcgggctgccacatgcagccaccaaggcagaaccgaaggcggaaccgaaagccgccatccccaccctcactgccgctgagttcgaccacgcccggcagatctacttcgagcgctgcgccggctgtcacggcgtgctgcgcaagggcgcgaccggcaagtcgctgacgccggacatcacccgcgcacgcggcaccgagtacctgaagaccttcatcaagtatggcagccccgccggcatgccgaactggggcacctcgggcgatcttactgacccggaagtcgacctgatggcgcgctatatccagctcgacccgccgaccccgcccgaatactcgctggccgatatcgagaaaagccgcaaggacatcctgccggtggcccagcgtccgacaaagaagatgaaccagtacaacctggacaacctcttctcggtgacgctgcgcgatgccggcgaggtcgcgctgatcgacggcgacagcaagcagatcatcaatatcgtcaagaccggctacgcggtgcatatctcgcgcatgtcggcgtccgggcgctacctgtacgtgatcggccgcgacgcgcggctggacctgatcgacctgtggctgcccaagcccgatatcgtcgcggaagtgaaggtcggcatggaggcgcgctcggtcgagacctccaagtacaagggctatgaagacaagtacgccgtggccggctcctactggccgccgcagtacgtgatcatggaaggcgacacgctcaagccgctcaaggtggtctccacgcgcggcatgaccgtggacaacgaataccaccccgagccgcgcgtggcggccatcgtcgccagccatttccatccggagttcgtgatcaacgccaaggagaccggcaagatcctgatggtcaactactcggacttgtccaacctgaagaccaccaccatcgattcggccaagttcctgcatgacggcggcttcgacgccaccggccgctacttcctggtggccgccaatgcgtccgacaagattgccgtggtcgacaccaaggaagacaagctggccgcgctgatcgacgtgggcaagaccccgcatccggggcgcggcgccaacttcatgcatccgaagttgggcccggtctgggccaccagccaccttggcgacgagaccatcagcctgatcggcaccgacccggccggacacccggcgcaggcgtggaaggtggtgcagaccatcaagggccagggcggcggctcactcttcatcaagacccacccgaagtcgtccaacctgtgggtcgacacgccgctgaaccctgacgccaagctcaaccagtcggtggcggtgttcgacacgcgcaacctggaagccggctacaaggtgctgccgatcgccgactgggccggcctgaagggcgcgggcgccaggcgcgtggtgcaggccgagtacaacaaggccggcgacgaggtctggttctcggtctggggcaccaaggacggcgagtccgcgctggtggtggtcgacgacaagacccgcacgctcaagaccgtgatcaaggacaagcgcctgatcaccccgaccggcaagttcaacgcctataacacgcagcacgacgtgtactgagccggcgccaccatgcgtaatcacatcgcctggcggcgcgctgcgctggcggggctggcagcggccttgctgggcgcagcgcccggcgcggcggcccagcccaccgctgcccggcaggcgcagcttgcgcactggctgcgcgatgactgcggcgcctgccacggcatgacgcttggcggcgggctgggcccgccgctgacgcgcgaggcactgtccggcaagccgcccgagggcctggtcgccaccgtgctgtacggccgccccggcaccgcgatgccgccctggcaacccttcatgacgcaggatgaagcccaatggctgatcgatcgactgcaggccggcaagccaccggccgcctcgccgcaaggcaactgatccgcggcctggccgcggccttgtgcgccaccgttgccgccgcgctggtggccggttgtgccagcgccgcgcgcggcaccggcgacctgggcgtggtggtggagcgcgccgccggacggctgcagatcgtcgagaccaccggcatgacccggctggcaaccgtggaaggactcggtgatttgtcccatgccagcgtggtgttctcgcgcaacacacgctacgcctatgtcttcggccgcgacggcggcctgacgcgcgtggacctgctcagcgcccgcatcacccaccgcgtgctgcaggcgggcaacagcatcggcggcgcgatctcgcaggacggccgcgtggtggccacgcagaactacgcgcccggcggcatccgcctgttcgatgcccagacgcttgagccgctggctgacctgccggccatcggcaatgacggccgccgctccaaggtggtgggcctggccgacctgcccggccgccgctttgccgccagcctgttcgaatccggcgaaatctggatcatcgatgccggcgatccgcgtcagccgcaggtgacacgcctgcccgccggccgcgagccgtacgacggactggtcacgcccgatggccgctggtacctggccggcctgttcggtgaggacggcctggcgctggtcgacctgtggcaggcgccgctgcagtcgcgccgcgtgctgtccggctacggccgcggcagcgcgccgctgccggtctacaagatgccgcacctgcgcggctgggccatggcccagggcttggcctggctgccggcgatcggccgtcatgaggtgctggtggccgatcccgccaacggctggcagcaggccgcgcgcgtggcgctggccggccagccggtctttgtgatggcacgccccgacgggcgccaggtctgggtcaacttcgccttcccccacaacgacacggtgcaggtgatcgacaccgccacgcgccaggtggtgcgcacgctgcatccctgccgcggcgtgctgcacatggagttcacgcccaagggcgagtccctgtggctgtcctgccgcgacgacaaccgtgtcgagatctacgacaccgccagcctggcgcgaattgccacgctgcccgccgacagccccagcggcatcttcttcaccgtgcgcgcgcaacggttcggcatgtaaagggacaccatgtacgatgaactgagcgtctacgacaccctgcagcgcgatttcccgctgcagccgcggccctaccaggcgctggccggcaagctcggcctgtgcgagcacacgctgctgagcctgctggcgcgcgacctgggcaacgggcgcatcagccgcgtcggcgcggtgttcgcgcccaacgtgatcggcgtcagcacgctggcggcgctgtccgtgccgccggcccagctggaccgcgtggcggcgcgcgtcagtgcctgcgcggcggtcagccacaactatgcgcgcagcggccatccgtgcaacctgtggttcgtcgcgggcgcgcgcgagcgccgcatgctcgatgtcacgctggcgtcgatcggggaaatgaccggcctggcgccgctggacctgcccatggcccgcgagtatcacatcgacctcggcttcccgctcgcgcgcccgggcagcgcacgcgcccgccgcgctgccagcgcggccgctcccgccgcgcctgtcgccctggacgatgacgactggcgcctggtggccgcactggaagccggcctgccgctgacgccacgcccgttccacgcactggcagcgcaagcgcggatggcgatgcctcaggtcctggagcggctgacgcgctggtccgcgcagggcgtgatccggcgcctgggcgtggtgctgcagcatgggcgcttcggcttcggccacaacgccatgtgcgtgtgggatgtgcccgacgcgcacgtggacgccatcggcatgcggctggcgcggctggcgcgcgtgaccctgtgctaccgccgcgcgcgccggctgcccgactggccctacaacctgtttgcgatggtccatgcgcgcaatgcgcaagacttgctgcccgcgctggcgcgcatccatgccaccgccgggctggaacatgcgcccgggaccgtgctggtcggcacgcgctgctacaagcagcgcggcacacgctatgccatgcaggtgtcggcatgacccgtgccatcgccgcactcgacccgctcgaccgccgcatcatcaacgcgctgcagcgcggcctgcccctggtgccgcatccgtatgccgaagcggcggcggcgctcggcatcaccgaggccgaactgctggagcggctgcgcgcactgcttgccgcaggcgtgctgacacgcttcggcccgctgtaccagatcgagcgcgcgggcggcagcttcgtgctgtgcgcctgccatgcacccgccgagcggatgggcgccgtgatcgctgccatcaacgcgcaccccgaggtcgcccaccactacgcgcgcacgcatcacctgaacctgtggttcgtgctggcggtggcgaggcaggaagatgtcgcgccggtactcgcgcgcatcgcggcggcggccggcgtcgagatcctgccgttcccgaaggaacgcgagttcttcgtcaacctctacctgcccgcctgatgcccaagcctgtcgatcccgtcgacctggcgctgatccgcgccacgcaagcaggactcccgttggtgccggcgccctacgcggcagtggccggcgcactcggcctgaccgaacaggaagtgatggcgcggctcgccgcgatgcatgcgcgcggcgtgctgcgtcgtatcggcgccgttcccaaccactaccggctgggctggcgcgccaacggcatgaccgtgtgggacgtggacgatgcgttcatcgacatgctcggcgagcgcatcggcgccctgcccttcgtcagccattgctatcgccgtccgcgccacttgccgcattggccctacaacctgttcgcgatggtccatgcgcgctcccgccaggacgccgcgccgcaggttgccgcgatcgcggcactgcttggcgacgcctgccgcgcgcacgacgtgctgtggtccacccgcatcctcaagaaaacggggctgcgcctgccgccgcccggcccagaccaataggaaaccccgcccatgttccgcctgtcccgcttcatggaagccctgcgcgatgccggcccggtgccgccgccgcgcaagcccgccggcccggtggtgatctggaacctgatccgccgctgcaacctcaactgccggcactgctatgcaacctccgccgacacggacttcaagggcgagctggataccgccgaggcgctgcgcgtgctcgaccagttgcgcgatgcgcgcgtgcccgcgctgatcctgtccgggggcgaaccgctgctgcggccggacctctacgagattgccgcacgggcgcgcgcactcggcttccacctgtcgctgtcgtccaacggcacgctgctcgatgcggggcatgccgcgcggctagcggcagcgggcttcgactacgtcggcgtcagcctggacggcctgcccgccacgcacgaccgcttccgccgcagcgacggcgcctttgcgcaggcgctggcgggcctgcgcgccgcgcgtgcggccggcctgcgcgtgggcgtgcgcatgacgctgaccgaagccaacgcggcgcaactgcccgacctggtggcgctgaccgagcatgagggcatcgacaagttctacctgtcgcacttcaactatgctggccgtgcacgcagccatcgcgccgaagacgcgcaccatgcgcgcacccgcgccgcgctcgactggctgttcgaccacgtctggcagcgcacgcagcagggccatgcgggcgacttcgtcaccggcaacaacgatgcggatggcgtgtacctgctgtactggatcgccaggcgcttgccgcatcgcctggtggatatgcgccagcggctggaacactggggcggcaacgccaccggggtcggcgtggccaatatcgacaacctcggcaatgtccatcccgacacgatgtggtggcacgtgaccgtgggcaatgtgcgcgagcggccgttcggcgagatctgggccagccgcgccgatccgctgatggcgggcctggccagcacgccgcgtccgctgcaggggcgttgcgcgggctgcgcatatcgcgccatctgcaacggcaatacccgggtgcgcgcctttgcgctgacaggcaacgcctgggcggaagatccgggctgctacctgagcgatgccgagatcgcgcatgcgccgggcacggaggtggcggcatgaagaccgtgctccgatggctggtcggcctggcctttgcctgcgccacgcaagccgccatggccgccgaccccgcggcgctctacagccagcactgcgccgcctgccatggcgcggaccgcctcggcgccatgggccccgcgctgctgccggaaagcctggaacgcctgcgcgccagcgaacttgaccaggtgctgcacgctggccgcgccgccacgcagatgccggcattcgccggcacgctggccgagcccgacttgcaggccctggcgcgctggctgcgcacggcacccgcagccacgccgcaatggaacgcgcaggccatccgcgccagccatatcgtccaccacgcccccggcagcctgccggcgcggccgctgttcggcgccgatccgcagaacctgttcgtggtggtggaggccggcagccatcatatgaccgtgctcgacggggaccggctggcaccggtccatcgctttgccacccgttttgcgctgcacggcggccccaagttcagccgcgacggccgctatgtctacctggccagccgcgatggctgggtcagcaagtacgacctgtggaacctggcctatgtggcggagatccgggtcggcgtgaacacgcgcaacatcgccgtcagcgatgatggccgctgggtgctggccggcaatacgctgccgcgcacgctggtgctgctcaatgccgaagacctgtcgctggcgcgggtgatcgacgtgaaggggcgcaatggcgaggcctcgcgcgtctccgccgtctacgacgccgcgccgcgccacagctttattgccgcgctgaaggatatcgccgaggtctgggagattccgtacgccgatgcggccggtgcgccgctgccggcgctggcacctcgcgtggtggtgctggacgatgtgctcgacgacttcttcttcgaccaaccctatcgccatatcctgggcgcctcgcgcaagggtggcggccaggtgatcgacctgcagcagggtcgaaaggtcgcggcgctatcgcttggcggcatgccgcacctgggcagcggcatcacctggcagcgcgacggacgtgaggtgatggcctcgcccgacctcgggcaagggcgcatcacggtgatcgacatgcaggactggcacacggtcgccaccgtgccgaccaacggtccgggcttcttcctgcgcagccatgaaaacaccccctacgcctgggccgatgccatgatgagcccgaggcgcgacacgctgcaggtgatcgacaagcaaagcctgcgggtggtcggcagcgttactccgagcgcggggcgcaccgctgcccacgtcgaattcacgcgcgacgggcgctacgcgctggtcagcctgatggagcgcgacggcgccatcgtggtgtacgacgcggccaccttgcaggaggtcaggcgcctgccgatggacaagcccatcggcaagtacaacgtcttcaacaagaccacgcgctcggccggcaccagccactgagccggcgtggtgatgcccgatcgcaggagcccgagatgaatccacccctgaaacccggcaaggtctggctggtcggcgtcggcccgggtagcccggacctggtcacggtacgcgccatgcgcgcgctggccgcggccgaggtctggctggtcgatgacctgatcgcgccggagatgtcctgctatgccagccccggcacccatgttgagtgggtcggcaagcgcggcgggcgctgctcggtcagccaggaacgcatccagaagttgacgctgcagcacgcgctggccggccgcagcgtggcgcgcgtcaagggtggcgatccgctgctgttcgggcgcggcggcgaagaagccgccttcctgcgcggccacggcgtggccgtcgagatcgtcaatggcatcagcagcggcatcgccgccgcgcaggcactggggattgcgctgacgcaccgcgcgcactgccacggcgtgaccttcgtaaccggccataccagcgcgcacggctcgcccgactggcaggcgctggtgcgtggcggcaccacgctcgtgatctatatgggcatgagccggctcgcggcgatccgcgacggcttgctggcggcgggcatgcgcagcgacatgccggcggcagtggtgatgcatgccggcagcgagcaggcacgcagctggaccggcacgctcggcacgctcgccgaagcgctcgcggcggggctggccagcccggccgtgatgctggtgggtggggtggttgcagacacgctgcaagcggtgcacgcgatcgtgccggacgctggctcgctggccgcgtagcgtcggctgccagcaagttctaccgagttccggcgacccgattgtgtgctccctctcccgcttgcgggagggggagcaaacccgcagcatgcggatgccgtcagcaatcgcgcagtgcactcacctcaatacggtaatcccacataattctccgccagcacccgcgacgcagcctccgaccccaccacataatccagctccgcccgctgcatccgcaacgagaacgcatccgcatccgggaaccggtgcaacagcgaagtcatccaccacgagaagcgctcggccttccacacgcgctgcaggcaacgcgcggaatagccatcgaggccgctggcatcggcacggcggtaacgggcttcaaagccttcggacaacgccagcacatcactggccgccaggttcaaccccttggccccggtaggcggcacgatatgcgccgcgtcgcccgccaggaacagccggccaaaacgcatcggctcggacacaaagctgcgcagcggcgcaatgctcttctcgatgctgggcccggtcaccagcgcgcttgccgtctgcggatcgagccggctgcgcagctcctgccagaagcgctcgtctgaccagtcttccacgcgctcgctagccgccacctgcacgtaatagcggctgcggtggcgcgaacgcatgctgcacagcgcgaagccgcgctcatggctggcatagaccagctcatcggcaacggggggcgtctccgacaacagccccagccagccgaacggatagacccgctcgaacacctgccgcgccgcggccggcacgctctcgcggcagatgccgtgaaaaccgtcgcagccggcgatgtagtcgcaggccacctcgtgcatggccccatccttgcgatagcgcacggacggcgtgctgccgtcgaaaccgtgcacgctcacctcctgcgcttcatagacggtgggggtgtcatcggcgcggcgcgcatccatcaggtcgcgcgtgacctcggtctgcccgtacaccgtgacgctgcgcccgatcagcgcatgcaggtcgatatggtgacgctgcccgccgtacgacagggcgatgccgtggtggaccaggccttccgcatgcagccgcccggccacgccggcgcgttccagcgcgtcgacggtgacgctctccaggatgcccgcgcggatgcggccaagcacgtattcgggactgcgttgttcgatgatgatgttgtcgatgccggcgcgtgtcagcaactggccgagcagcaggccggccgggccggcgccgatgatggcaacctgggtgcgcatgtcttgtctccttgtggttatcggtcttctgccgctaaagatagtcggcggagacccgccaaggaatggacagatcgaaccaatgacaggacaatcggaacatcgatggtaaacacctaagccaccgtgaaacctgtcccgacgtactctctgtatggcatcaatccctcggaactgctggaaaaccagctccatttcgaatccattgccgcacgcagccgcctgcacggatgggagatcaagccccatcggcatgatcgcttcctgcaaattctgtacattcactcaggcgccggcgaagccttgctggaggagcggcgcgaacggctgcgcagcggctcgctggtgacgatgccgccacggcacatccacggctttgtcttcacgccggataccgacggcatggtcgtgaccatgaccgacagccacctgcgcacgctgctggcgggtgtgccggatgcgctaccgctgttcgccgatccgcgccacgaccgcgtgcgccggggccacccgctggccgatacgctggcactggttcgcggcgagatggaaaccgtgtccgcctggcgcggggcgtcgctgtcggcgttgctgacgctgctgctgatcggcatcgcgcggctggccaatgccgccgcgccggccgcggcgcgcagcgacagccggcccgcgcggcatttccggctgttccagcagttgctcgaatccgactatcgtgagcacaaggacatcacgcactatgcaagcgccatcggcatcacacccacgcagctcaaccgcgtgtgccgccaggcttgcgggcagtcggccctgcagatgatccacgcgcgcgtactggccgaggcgcagcgcgacctgctgttcagcgacctggaggtcaagcacatcgccctgtcgctcgggttcgctgacgcggcctacttctcgcgcttctttgcacggctggtaggacaggcgccgactgagttccggcagtcggggcgtgcgcggctgccggcatttgcgatgccaccgcccgcggatgcggcgggctgaccgctcagcctgcctggtcgatttcggcgaacacctcctcggccagatgaaatgccgagttcgccgccggcacgccgcaatagatcgcggcctgcagcaagacctccttgatctcgtcgcgcgtcacgccgttgttggcggcggcgcgcagatggagcttcagctcctcggcgcggttcagcgccaccatcatggcgatcgtcagcaggctgcgcgtatgccgcggcaggccttcgcgcgtccagatctcaccccaggcatagcgcgtgatgaggtgctggaattcctcgttgagcggggtcagccgcgcgagcgaacggtccacgtgcgcgctgcccagcacctcgcgccgcacggcaaggccggcgtcgtagcgcgcatggtcgtcggtcaccggcagccggccgcgcacgaaatcgagcagcgccgccgtgaagcggccgggctgctcgaagctggaaatatgcgcggcgggcagttcgacaaagcgggcgccgggaatcgcgtcggccagcgcgcggccttcctgcgcaggggtcgacgggtcctggctgccggcgatgaccagcaccggcacctggatcgatgcgaccgactcgcggaaatcggcgtcgcgcactgccgcgcaactggccgcatagccgcgcggagcgagcccggccagcacatcgcgcaggccgtccagcgcgcgctcggccgtggcggcaaactccggcgtgaaccagcgctcgaccgaaggcgcgaccatcacggccatgccttcgcgccgtacggtctcgatgcgggtattccagccgtcggcattgccgatcttcgcggcggtattggccagcacgatatgcgagaaccgctgcggcgcatggatgcccagccacatcccggtgagcccgcccatcgacaggccacagaacaccgcctgcccgatccccagcgcatccaggatggcgatgacgtcctgcccgagctgcgccacggtaaaggcatcgcccggcgcggtcgagcggccgtggccgcgggtgtcgtagcgcaccacgcgatagcgaccggccagcgcggcagcctgcggctcccacatggtgtggtcggtgccgagcgagttcgagaagaggatggccggcgcggactcggggccgtcaacggtgtagaagagccgggcgccggcgtggtcgaggtagggcaatgcagtctccttgggtgcgcggccggcggcgtggccggcgcatcgcggtagttccgggctcagggcagtctcaggactggcgcgccaccagtgcggattgccaggcctgcacggcagcgtccgcaaaggccgctgactggcccgcgtagttggcggggtcggcaaggcgatccagcgcggcgtcatcgagcaggcgggcatgcgccggatcggattgcagcgtgcgggccagcgcgtcacgcaggctggtgccgtcggcgacggcacgctgcgaggcgcgttccaccagatggtgcgccggcagcctgccgatcctgctgccaagttcaagcatcgccgcctcgccgaggatcaggccatgggtcaggccgaggttggcacgcatgcgcgccgcatcgacctgcagccccgccacgacctcgcccatctggcgcagcgcgccggcggccagcgtcacgatctgcggcagcgtgtcccactctgcctgccagccgcccagggcgcgttcatgttcctgcaccatgcccgccagcatcgtcgccaccagcgggggcacgcgcaccgcggccgtcagcaccgccgcgcagccgaccgggttgcgcttgtgcggcatggtgctggagccgccgcggccggggccagacggctcggccacttccgccacctcggtctgcatcatcagcgagatatcgcgcgccatcttgccgagcgtgccggtcagcatgcccagcgtggtggcaacctcggccatgcggtcgcgatgcgcgtgccacggcagcacgggcgcggccaggtccagttcgcgggccagcgcggcggtcaccgcgggcgcggcctggccaaggctggcgagcgtgccggcggcgccgccgaactgcagcgcgcgggcctgggcgcgggtagcatcgagacgaccgagatcgcggcgcagcgcatcgagccagcccgcggccttgaggccgaagctggctggcagtgcatgctggagccaggtgcgggcgaccatcggcgtggcccgatgcgccgaagccagcgcggcgcaggcttcgcccaggcgcaccaggtcggcatccagcgcgcgcagcgcgtcgccggcctggagcaccagtgcggtgtcgatgatgtcctggctggtggcgccccagtggacaaagcgcgccgcctcggcatcgcgcgcggccacggcggcggtcagttgcctgacgaagggaatcgcgagattgccggcagcgactgcggcttgcgcaagcgcgtcgcggtcaatgatgccgggatcgcggcagacgtcggagatcacggccgcggccgcggcagggatcacgccgctgtccgcttcggcgcgcgcgagcgcggcctccacggcaagcatgcgctgcaccgtgccggcgtcggagaaaatgtccagcacggccgggctgccggacatgggatcggtaagacgcgtagcggttggcattgggggcgatgggtagcgtgagtggccgtgacatcgacggccacccgattatgcgtctgttgccggcagcgagtgcctcagatatcgaagaacaccgtctcgccctgcccctgcagcgccacatcccagcgcagcgtgccgttgccggcatcgctggcaatcagcgtgccgcggcgctcggcggggaccagcgccagcacggcatcggcggcattggcggccgcttcgtccgggaagtacatgcgcgtggcgacatgcttgaccagcccgcgcatgaacaccgacaccatgatgtgcggcgcctgcggccggccgtccgggccgggcacggtgccgggcttgacggtgacaaagcggaacgagccgtcggcctcggtcggcacgcggccgaagccggtaaagccgggcaccagcggcagctcgcgcgcatcgtcggggtggcggtagcggccggcggggttggcctgccagatctcgaccatgccgtccggcacgggctcgccgtcggcgtcggtcacgcggccttcgatcacgatgcgctggccagccagttccggcgcgctggcggtcaggtcggcgcagttcaggccgctcaggccgatatggagataagggccgacggtctgggatgcggtggcgtagagcatggtcttactccatcggcgtggcatcgcggccacgcagcacgatatcgaaatggtagccgagcgcgtattcgggctgggtcgtctcccagtcgaggctggccacaagccggtcgcgcgccttttcgtccggcacgcagttgaaaatcggatcgaacggcaacagcggatcgccggggaaatacatctgcgtcaccagccgcgtggcgtaggcgttgccgaacagcgagaagtggatatgctgcggccgccaggcattgtggtggttgcgccagggataggcgccgggcttgatggtcttgaactggtagcgcccgctggcatcggtgacggtgcggccctcgcccgagaaatgcgggtcgagcggcgcatcatgctggtcgcgcttgtgcacgtagcggccggccgcattggcctgccacacctcgatcagcgcgttcggcaccggcctgccattctcgtccagcacacggccggtcacgaggatgcgctcgccgatgggctcgccgccgttgccgacggtgaggtcgttatcaccttcgcggacgaactcagcgccaaaggtgggaccggtcacttcagacagcgactgcggcagcgcaatcagcggctgggccggcgagcgcttctgcgtcgaggcataggggtcgaagcggtattcgggctgggtgtcccagtagggacggcggtactgggcaagacgggtcatcgggcagtctcctcgtcgttggaatggtttgactttaaacaacacataaagtcatgtaaattaagattactgttaaatacgataacttttaggcatgaaaccacaggcccctcccgcactcgaaatcttccgcaatcgcgtgcggctgcggcacctctattgtttcgtggcggtgtcgcagacccagcacctgggccgtgcggccgaacgcctgggcctgacccagccggccgtctccaagacactgagcgagctcgaggagctggccggcacccgcctgctggtgcggcagcgggccggcaccgaactgaccaccgccggcacgcgcttcctgcgccacgccctgcgcatcctcgcggatatcgatgccgcggcggacagcatggccggcgcggatgcgctgccgcaggagcgcatccggctgggtgcgctgccgagcgtggtgccggccgtgctgaccgacgccctgctgcgtttccgcgccgcgcatcccgaggtcggccttgccgtgcagaccggcatgaaccgcaacctcatcgaccaactcaaggcggatgtgctcgacctggtcattggccgcatggatgacccggtggccatggagagcctgtggttcgagtccctgggccaggactcgctggctctggcggttcgccccgggcatcccctcgccgccgtatcgcggccaacgctggtggacgcgctggcatggccgctggtgattccggccgcgggctcgattccccgccacaacacggaaagcctgctcgcccggcacggcctgcccctgccgggcggatgcgtggaaacctcggatgcctatctcggacgcctgctggcccggcagagtgacagcgtgtgggcagcgccgctctccgcaaccaggcgcgcggtgtccgagggagatctggtactcctgccaatcgatacgcagggcaccgaggaaccgatcggcctgctgcggcacggcgaccgcacgctcacgccgatggccgaggcgttggcaaactgcattcgcgccgcggcccagcctgcttccgctcagtgacttgcgacgcttgcgccgccattgactgagtcggcggcacccgcaggccggctgctgaaatgcttcaccagcagtgcaccggcggcaaggaatgccggcacggtaagcagcgtaaaaatcgtgtcgaagcccaggtgcaggcgcagcagttcagcaccgagcagcgcgccggtgatgccgccgaagcggccgatgccaagcatccaggcaacgccggtagcacggccctgcgtcgggtaaaaggccgcggccagcgaaggcatcgaagactgggcgccgttcatggccgtaccggcgaggaagatcagtacgcccagcagcacctggctgccggtgccgtggcccactgcgtagatcagtacgccggttgcagcataggtgatggcgatgaccttgttcggattgaagcggtccatgaaccagccggccgcgatggtgccgatgccgccaccgagcggaaacagcgccgtcaggaatgacgcgtgctggatcgagaaaccggcgtccttcatcagcgtcggcatccagctcgtcagcaggtagaagatgacgaggcccatgaagtaagtggaccatagcatcgccgagcccaggcgatagccgggcgccagcacggtgccgatggcggatcgggtcgcaggggcctgctcgccgatgatgaagttgttggccctggacaggtctgcgccagtcacgcgtcgcagcacgttgcggatctgggtggcaggatagttgcgcaggaccatgtagcgcacggactccggcagcagcgccaccagcaacagcgcgagcgcaagcggcacgatgccgccaagcagcagcacgctgtgccagccgaagtgcgggatcatcgcggcggcgacaaagccgccggccgcggaaccaagcggaaagccgcagaacatggtgttcacgagcacggcacggcggcgttgcggcgcgaactctgatgtcagcgtcacggcattgggcatggcggcgcccaggccaaggccggtcaggaagcgccagaccgtgagccagcccagcgtgggcgcaaacgcggtggcgagactgcaggcgccaaagaagaagacggacagcaccagcaccttcttgcggccgacccgatcagccagcggaccggcgaagatcgcaccgaaagcaagaccgaacagggccgcgctcatgacgggcccgagggcggctttctcgatcccccagtcctgcaccagcgccggcgcgatatatccgattgcggcggtatcgaaaccgtcaatggcaacgatcaggaagcacagcacaagaatgagccactggtacccagtgaatcgctgtccgtcgatcagggcctggacgtccgtgacgccgcccttcgtttgggtgggatgttgcactgctgtctccgttttcctggaaatcgcactagccatcctgcaggccggacatgcgattttgttctaatggcgaaccgctgttctccaattgaacggaatcttaggcaacgggcattgcgactcagaattagcgttaacccggcgggaaattggccgtccagcatgtggatttcaccggaacgcgccatttttttggaaccagattgaacatctggatcagggaacagtgctttctatcagaaaacgaactgttcgtgaaatctactatcagactagccttgcggtatttcggcggtataaccaaatttcatgcaaacagcgccaactctcaatttacattccgaaacccgcgacctatagtccctggccccggtgcgccgagccgatgcaatcctgcggtgccgtgcctgtccaatgtctcaggacacgcggcgccacaagccgccggcccgaacaaatccatccgatcatgcaacgcctgcttctcatccttggctgcctgctgatcgcagccgcagctgcctggccctggctgtcgaagctgccgctcgggcggctgcccggcgatatccatatcgtccgggacgggttcagcttctactttccgatcacgacctgcatcctggtgtcggtgctggtgtcggtcgtgatctggatcttccggcgctgagcactgcgtggcggactaggcttgcgcctcggtccggaacaccgccaccgcccgctgcatatgcagcgcctgctcctgcagcgactgcgccgccgcggcggcctcctccaccagcgcggcgttctgctgcgtgacctggtccatctgcgtcaccgcctggttgacctgggcgatgccgctgctctgctcgcgcgaggcatggctgatctcatccatcatcgccgtcacgcggccgatggcggcaacggtgttctccatggtcgcggcaacgtccagcgccagcgtgttgcccgacgccacgcgctgcgccgattgcgagatcagcgtgcggatctccttggccgagctgccggcgcgctgcgccagcccgcgcacttcggtcgccaccaccgcaaagccgcggccggcctcgcccgcgcgcgcggcctccaccgccgcattcagcgccaggatattggtctggaaggcaatgccgtcgatcaccgcgatgatgtcgacgatgcgccgcgaatcggcctcgatctcctgcatggtctgctgcatgcgcccgaccgcgtcgccgccggcgcgcgccacgtcagacgcctcgcgcgccagctcgctggcctggccggcattgctggcgttctgctgcacggtggccgtcagctgctccatgctggccgcggtctgctccagcgacgaggcctgctcctcggtgcgctgcgacaggtcgatattgccctgcgcgatatcgcccgccgccgccagcacgttgtgtgcgccggccttggtgtcgccgatcagcgcgcgccagctgtccaccagcgacagcaggtgccgcttgatctcgctcagttcatcgcgcccgcgcaccgcgatgcgcagggtcaggtcgcccgcgttgatgcgttcgaccatctccgccacctgccgcacgtcgccgcgcgtgccgcggctgaagccgatgaacaggtagaacgcggcggccacggtcaccagcgcaatgcccgccagcaacacgaactgcctttcctgcgccgcgacacgctgtgccagcatggcgccagcgacctcggcaaacgccttgttggcggccgccacgccttcgatggcggcggtggcctcgtcgaagtaagtcttggcatcgatgtcgatgccggtcgcgcccagcatccggaccttgagcgtgcgatggaaattgtccatcgcggcgagtcgcgccagcgcggcgccgatgcgcggccggtacgccggtgccgcgttcccgacgcgcgcgatgtcgcgccgcaccgtttccagcccctcgtggatctgctcggcgagcgcgcccagacccgcctgctgcgcggcatcggcatagccgccctgcgcgatgatgccggccccgcggccgcgcgccagcgcgctcagttcggccaggcgcggcatcgggcccaccagcaggctgatcaggtagtaggagcccgcttcgctgtccagcgccagttgcgagcgctcagccacgtcgccgataaacgcctgcgtctgccgcaccagtgcgctgtggcgctcgaacagcggcccggccatggtgtccaggccaagcccgcgcagatgctgccagtcctgctccagcttgcgcgccccggccccgagttcgaaagcaggattctccgcgatgctgcgcgtcagccccgccaggctggccgcggccttgttgtcggccccatcgaaggtggcgcgaaaggccgcattgcccgacaacaccgcattggcggcgccgcgccggacctgggtctcgcgcatgaagtcgagcgcatgcccgaccacggtgagcccccgcacttcatcgccggtggtgcggatcgatcgcgccgcatcgctcagcaccacatacatcgtgccgcatagcggcaccaggaacagcacggcgatcagcgcgagcttgcggttgatattcaggcgcgccatcaggcgctcggcgggaaggaaaataggagtcatggcggtcgcggaacttggcttggttttcctcctatcggccttgatttgcaggcctgaagcacgaatttcgaaggtcttgatgatgcgcaaatccagtgcagaaaacgcgctgaagtggggcagaaagcacgggttgcgggcagcgtcggcaccgctgcctgcccgcgtgcaccgaagacgtgtggggcatcgggcaaggggtgacggcggcctgtccggccttgtgcccttgacggcgtcgtcttcggcgcctccctgagcaagctcatgcgcgacgggtccgctcgccgcgctcgcgccgccgcgggcccgggctcccgaccatacctggcgtgggaatcgcttgccgcatggcatcgacaaacaacctgagcttcgccggatagaagcgcgcataggggtagaccaggtagatcggcaagggatcggcctgccactgcggcagcaggtgcagcagcctgccgctggcaatgtcatcggcaaagatccaggccgagccgacggcaacgcccagccccagccgggtcgccgaatgcagcgcatagaggctgtccgtgctcatgcgcggctggaatgcgatgccttgtcgcgccagcgtctgcgtgttctgcagcacgacctcattgcgatagaaggtgcgcagcgccagccatggcaggtcctccaggtcttccggccggcgtggcagcggcttaccctcaaacagcgacggtgcggcaatgaccgcgcgcggcacgtctgcgagccgcaccgccaccacgccgggttcatgcacttcgcccacatggatcgcgcaatcgatggcctcggcgatgaaatccggggtgcggtcatgcagcagccattccaccgagacttcggggcactgctgcaggtagccggccagcgggccgaccagcagctcctgcccgaaagcgtgcggcaccaccacgcgcaacgtgccggccggcgcatgcccgaccccgcgcacgtcggcctcgaacatggtccagtcggccaccagttccttggcacgctcatagcagcgctcgccgtcctcggtcagcttcatcgcatgcgtggagcgctgcagcaggcgcacgccgagcagccgctccagcgtctgcaggcgccggctgacggtgggctgggtcgtctgcagctgcgctgccgccatcgaaaggctgccggcctcgacgatgcgcacaaaggtctgcaacagctcgatgcggtcggcgctggtggcgccgcgggcggctgccctgccctgcatggtggtggttcgctgcgatgctggctggcgtttcatacgcatctcgtataaccattgttcatcccgcacgtctaccagaatcagcccgcgtggacaacacttcgagccatccaaacctgcctgcggatctcgcaacctcgatatgtcctctgttcccgccaccccatccgccgccaccattgccagcccgcccctgccgggacgcctggtgctgctgcttgccgtcggcgcgggcctgtcagtcgcctcgctgtactacagccagcccatgctcggggtgatggcacccgacctgcatgcctccgattcggcaaccggcgccatcccgaccctgacgcagctcggctatgcgctgggcatcctgctgctggcgccgctgggcgaccgctatgaccgccgccgcatcatcgtggccaaggcagtggcgctggtcggcgccttgctgctggcgggcctggcgcccggcattggcgccttgctggtatccagcctggtggtgggcctggccgccaccatggcccaggacatcgtgcccgctgcagcggcgctggcgcccgcggcgcagcgcggcaaggtggtcgggacagtcatgaccggattgctgctgggcatcctgctgtcgcgggtggtgagcggcttcgtcgccgcgcacttcggctggcgcgccatgttcatgattgcggcggccagcatcgcggcggtcgcgctggttgcccggcgccagttgccgcgcttcacgcccaccacggtgctgccgtatggtgcgctgctggcctcgctggcggcgctgtggcgcgagcatggcgccttgcgccgcgcggccctggcgcaggggctgctgtcggtgggcttcagcgcgttctggtccacgctggcagtgatgctgcatggcgcaccattccatctcggcagcgaggccgcgggggcgttcggcctggccggcgccgctggcgcgctgggcgcgccgcttgccgggcgccttgccgaccgcagcgggccggagcgggtgacccggctgggcgcggcactggcggcgctgtcgtttgccgccatgctgctgaccccgctggtatcgccgcatgcgcagttgtggctgatcggcgccagcgccatcgggttcgacctcggtgtccagatcgccctggtcgcgcaccagaccatcgtctatggcatcgatccgggcgcgcgcagtcgcctgaatgccgtgctgttcgtctgcatgttcaccggcatggccgtcggcgccgcgctcggcagcctggcactggcgcgtttcggctggaccggcgtggctgcgctggcgagcgccgccgcgctggctgcgctggccgtgcggctggcaccgcggcgtggcgcgcgctgagggcagccccggcctggcatgctgagccttcgcgccgaggctgccggacctctacgcgacgggcgcgagcccctccccgtccgtgccggcctcctcgccgtctcccggcgccagcggaacctccaccgtcagcgccgtactgcccggcgccgaccggatctgcaagcgcccgccgatggccgccgcgcgcacctgcatgttgcgcagcccgcgcccgccgcgcgtggccccggtgtcgaagccgcggccgttgtcggccagcgtgatccggatcacctgcgcgtccatgtccgcgtgggcggtcacggtaagggcggttgcccgcgcgtgctgcagcacgttggtgatgccttcgagcagcaggtattgcagctcctgcaccttgcgcgcggtgaaatgcgccagcgcgggcaggcgctcgacctcccagtggatgtcgagccccccatcggcgatgcgcggacccaggcggtagcgcaggttgcccagcactgccgccaggtcgccgccggtgtcctgcatggcgtcgatggaaagcttcagcgaatccagggcgtgccggacctgcacggcgatttccggggagctggccttgccggattccagcatcgagatcgtggtgacaagctggctgcccaggccatcgtgcatgtcgcgcaggatgcggccgcgctcgcgcagcgcggtctcctcggcggcgatcttctgcgtgcgcgcgaaggccgcgcgcagctgcgcctcgcgctgcgcgacgcgctcggtcagcacctggttggcgtcctgcaagctctgcaccgcgctggtgtagcgctccaccagcatccacgccatcaccacgctgaacggcaccgacacatagcgggtcatggaatggacccagtagtagtcgccggtcagccagaccttgatccagtccgccaggaacagcagcgccgacacgcccacggtggcggccagcagcgtcgcctcgcggctgggccggcgcaatgcgccccataccatcgcgccggccacggtcaggatgatgcccaccttgaccagccagctcagcggaaagaccatcgggtggctcgacatcgcggccagcggcgcgaccaccggcagcgccagccacaggtaggcgttgagggtgcggtgcagccagcgccacggcacgcggatcaccagcaggcagaagcgggcgatggcgcccaggaatacctcgcgcgcggcggcgacgatatagctgcgcagctccgcgggaatcgccaggtcatcgacaaagtagtcgagcaggcgcacgctccaggcgacctcggccagcccgtacaggccgaacagcgggtcgcgctggcgccaccagatcagcagcgcgaggccgcccagcacgacactgagcaccgccgcaatcagcgggccgaccacgcgcaggcggaaggcctgctcgaactgcgcgcgcacttcagcggccggacccaccgtcaccggcagcaggcccgagcgcgcataggcgcgcgccgccacggtgatgcgcagcaggttgccgtgcgcgcgcgccagctcgggcggcacggccacgtagtaggggcgcttggccagcgccgacgagggtgcgtccaggcgcccgccggcggcgatcagcacgccattgacgcgtacctcgtagctgccgccggcccatggcacgaacagccccccggggtcagccgcgggccagttgcggtcaaagcgcagttcgtaggccagcgtgccggacttgcccggctgctcccggtcccagtagtcaggcagcgtcagcgggcgcgccggcagcaccgtgccgtcggtcagcgtggccgagcgcgtggccgcggccagttccatcgtgcccgcggctgccgccacgccggacagcatcaggcaggcccatgccagcagcacgacaagcacgatccggaggtggcgcggccgatgcagcatggggtggggtcacaaggacttgagcaggcccagcttggccgcctcgaacacggcctcgccgcgcgagcgcactgccagcttgccgtagatgttcttgatgtgcgattgcacggtatgcacgctcagccccagatagcgggcagtctcggcataggtatagccgcgcgagatcaggtccaggatctcgttctcgcgcaccgacagcaccacggcgccggtggccgcggcatcgcgcgcaaccgcctctgccggcgcgccgcgcagccggttcaccacctgccgcgcgatcagcgggctcatcggcgagccgcccgcgcgcagttcgccgatggaggcggcgatgcggtccgtggtttcgtccttgagcaggtagccgatggcgcccgcctcgatgctggccagcacgtggtggtcgtcgccgaacaccgtgaccaccatgcagtcgcaggcgggataacgttcgcgcgcggcgcggatcacgtcgatgccgctgccgtccggcaggccgaggtcgcacagcagcacgtcgggctggtgctgcgccagccaggccagggcctccgccgcgctggcggtgcagcctgccaccacggtggccggcgcatgcatctcgacggcctgcaccaggcggctcagcgccgccgggtcatcctccacgatcaggacactagttgtgcttgccatgcctgtctcttcccgagccatgccgttgtgccgcccgttgcgccgggcacgacggcggattctgacatatccgtccgcaccaaggacggccgcgcggcctccctcagggtaaacgccgccgcccccacccatcgcacagtctgccgcggtttcccatcccatattctggggaggcgcctgaatccacctgcccctatgatccggcaaaacagcccaatcagccgcagccagcagtgcgggcaacaagacaggcaaacaagcgggaatacggggaagaccaccgtgacacataagacagccggcacaccggccgcacgggaaatcgggcatgcaaggggggagcccgcaggcgccatcccggcaacggccgcggtgcggctggctgccgggatggccgcgtgcgggctggcggcgttgctggccggttgcctggccaccgcaccgaacacggccggcgtggccgccatggagctggacgtcagccgcaagggcccggtgtccggcgtcggcctggacggtcacgacatcgtggccatggctgaccagatgatgcgcgacatcctggcgcagccgcgttttgcgccgggcaaggatggcaagcgcccgcgcatcgccctggacagcgccaacttcatcaacgacagctcacagccgctggaccggcaactgatcgtggaccggctgcgggtcagcctgaaccgcgccgcgcaatcccgcatccagttcgtcagcgcgcagactgccctggtcgaacgcgagcgccaggccaagcgcagcggcgccaccgatgccggcacgctgggcctgacccgcgcgcgcatcggtgccgactacagcctgtccgggcgcatcggctcgctcgacagccgcagcgccgccaccggcatggtgcagcgctacatgcagatctccttcgagctggtcgaggtcgaatcgggcgagctggtctggagcaacatctatgaattccagcgcgccgcggccgacgatgtggtctatcggtaggcgcgccggcgcgctggcggcctgcctgctggcgctggctggctgctccaccacgccccccgcccatcgcggctgcacgccgtggcggcagcagcatgagcgccccgccctgcccgtctcgttcctctcgccggagctggccgacatggtcggcgtgcgcgagcttggcatcgcacgcaccgccagcgggcttggctccgtcagtgcgggcctctacaactgcgccgaattcgacgtcgcgctgctggtacgcacccgcttccgcccgcagcaaggcggcaccgcccccgagccgcccagcgcctggcgcacgctggtgctgccgccgcgcacgcagctcgactacgccgagcacgccgtcatggccggctcattgccgggtgcgctcgaaatcctggacgcgcagcgggcgcagcagccctaccgcccgggccagctctaccccgcgctgcccaggccagcacgcccatgacgatgcgttatgcccggtcctgccggcacccctgacatccatcccgttctgcagccatgaccggagcttgttccatgccacgtccttccttgctggcggccaccctggccgccgtcctccttgccggctgcgccgccccgcagatggcgctgaaatccacccgcaccggcggcgacagctcgccccaggtgcgcgccgatatggccggcaaggccgacctgtccagcctgaacgtgggcgataccgtggccgtgtcccccggcaacagcaaggtcgtggtggcctcgaccccgctggtctacaccctgtatgaagatggcatggtgacccaggccgaagtcaagcggcagctggcggtcaaccgcaaggacgtgcccaggatcgaattcatcaagggcgaactgcaccgcggcgacttcatccgccgcgagatcctgctggacctgcacagcaaggaccccgacgagttcaaccgcaccatccacttcctggccttcaaccgcggcgacaaggccttccgcggcgacctgacggtctatgacctgctgcccgccgagctggaactggtcaagctgggcagcgccaacaagtacaccgaccagaccatggtcaagggcgtactgagcgggctgccgttcctgtcgctggtgacgctggcgatggacaactattcgaaatccgatgagcaggtggcgatgcggcacgagcggctggaccaggtgcagaagttcacgttccagcgggtggtgctggagccgggccaggcgatcggcttcaccatgaacgtgcgctaccaactgcccggcgaacaggagctggccgatctgcgtgaaaccgccgcgccgctggcacagcaccgctgaggccggcaatgcggatccgcaagactgcccgggggatgcggcgcaccgccgccgcactggccgcgctggcgctggccgcgcccctgccgggggcggcagcctggttcgacggcgaagagaagcggctggcggccgaagccgaccgcttcgttgccgacaaagccgccgaactccagcgcatcctgcatacgctgtacatggaaggcgagtggaatgccgtgctcaacttgaacctgctgggcctggccgcgatcgaggccggccagccgcgcctggccgggcgcgccttcgacatggccgcggcgcgcatcctgcgcatctatgccgacgaccccaacgcacagcaagccaagtcgctgtggtccgccgaaagcgtcaaggactggaagggcgaaccgtacgaacgggccatgaccttctactaccgcggcctgctctatgccagcgccggcgactaccagaacgcccgcgcagccttcctgcaggccgacatccagaacgcgttcgggcaatacgagcgctatgacggtgatcagggcggctttgcgctgatggcctggctggcggcctgggcctcgcaatgcgccggcgacagcgcgcgcgcggctgagctggcggcgcgcgcggccaggcacgcaccggagccgttctacgcccagccgcgcggcacgctgccgcggcacctgagcgtgttcgagcttggcatcggcccggagaaagtcacgctgggcgacaccaggagcatcctcggcttcctgccgcaaggcgcggcaggcagcacgccgcgcatcgcctatgcatcggcggtgaagccgatggcctcaggcactgccgccgacctcgaccgcgtcgcgctgacccggggcgggcggccaatccagggcatcctggatggcaaagccgtcttcaaggaaaacaccgcgaccattgccgatgccgcgggagcgctgtcctcgggcctggtgaatgctgcgttgtcgggagccaacagtggcaatgccggcctggcgcagggactgggcgcagccggggctgccggctcgctgatcagccttgccgcgggggcgatgtccagggcggccaatgccgaggccgatacccgctactgggcatcgctgcccaagatcgtctacctgcaaggcctggctgcgccgctggcatcgccggccgtgcagttcacccctggcggcggcggcaagccgcgctctgccctgctgcaaagccgccatggcgaatgctcgctggcctggggccgtgaatattccgccttcgatgccgagcatggcggcgtggccaatccctcgccctggccggccgagccggtcgagtccgggcgcgagcgcgccaacgcggtcctgcgcaccgaactgctggccctgccgttcggccagtagcacagcccccgtttgggggatatttcccacttttccccgaaattagagcgcttttgccagttctgtcgaattttgcaacctgtacgctacaatgcctcgtcgtcagccgacggggctggcggatctggagaaaaacagaatgaagacgggaaaactggtggtagggctggcgctggccgggttgctggcgggatgtgaatcgatggacggcgcaatgtcctccatcagcggcgtgctcgacggcaccggcgacgtgctgagcggcgacttccgcatgctggcggatccgaagccggcttcgctgggcgatatctggtcggactggaagaagaacgaaatcaccgcgaagaagaagtgggattcgcaggcaatcctggtatcgggtacggtctcccgcatcaccaaggtggatggcctgggcaagtcggacgacaccatcgccgtctacttcaaggactcggtcaatccgcagtgcaccggcaaggcgctgatgcgcgacgcgctgatggtcaaccagaagaagatcagcaacctgcagaccggggacaaggtcaacgtcaccggcgtgctggccacgcgcgattcggaaatggccaacagcagcaataccgaatgctatttcgcgttcagcaagtcgaagatcgaatcagcggccaataccacggcagctgccggcagcgcggccgctcccgccaaggcagccacgaccaccaagtcgaccaaatcgacaaagtcgaccaagaccagcagcacgaagtaaaccagccaaaggcggcgacgggcggcagtatggccgcctcgccccaggctgcgcgtctggcgtccctgcctcgcaccatgtggatcctgcggcacggcacgcccgtccggccctgcatcccttacaagctctgaaaccgttgcacggtagcgcacgccaaagtgccgcaaatccccgtccgcggggcacccccctccacacggtacgaatcttgccccttcctgattacccgccagcggttcgcgcacggcatgtgcgcccgcacatggcgccacacgcacactgtcaggaaaacagcatgggctactactacgatgagcgcaatgcgcgcaacgcgcgccaacgccgccaggcatggcaggacgatgactggcaacctgaatccgaacaggagcgctggcaagcgcggcgtcggcgccagcaaatggccccgggccaaaccagctacggcggccccgcccgcccggaccgggatttcaacgaagcgtacggcgcccgcaggtacccggcacacccgtccggcgagcgttacggcagcaacctgcgctacggcctgaacggcggctatggctgggagcgtgccagcgaatggcgcgacccgcaggcgtggcaacgcgacgacgacaacgccgagcgccagtggcgccgcagcgccgaacgcgcacgggatccgcgtgaatcgccgcgcacgcgcggccatgacacccacttcggcgacctgcgcagtgacacccgctactgggtcgacccgcacgaggactgggaagagaagcagcgctatgaaatccggcgccacagcccgggctaccgggaatatgcgcagcgccgcggctgggaaaccgacagccccgatgacgagcgcgaaggctcgcatggcgtgctctacaacctgggccgccgcatcggcgaagccgtgggcgactggttcggcagctccgaacgccgcaccggcccgcgcggctaccagcgcagcgacgagcgcatccgcgaccagatctgcgagcagctcagctacgctcgcggcgttgacgtcagcgacgtcagcgtcgacgtcagcgaaggcgtggtgtcattgaccggcaccgtgcgcgaccgcggccagaagttctatatcgaagacctggccgacggcacctacggcgtcaaggaagtcaacaacgacatccgcgtgcgccgcgaggcccccgaagcccgcagcaccagcgatgtgaccggcagcacctggcgcggataacgccaacggtggcgggcgccccaggccgagatcggcctaggcgcccgccacgccaacctccgccgccagccgttcgcggataaaccccaggaacgcacgcacaccctcaggcaatgtgcggccggccagcgtctgcagttcgaccgcgcggctgcgcatgccgcgctcccggatcgaggcggcgtgcagttcaccgcggcgcaacctgtcgcccacggtgacggcgccggagatcgacagcccgccaccgtgcagcacgaagctggtcagggtctcgaagtggttggtcaccagcaccggctcgaacaccaccccgcgttcgccgcaagcgatgtcgaacagctggcgcacggtgttgtcgccctccggcagcgccaggggataaggctgcatctgcgccagcgtgacgctgcgaaagcgcgccagcggatggtccggccgcatgatggcgatcaccggcgcgggctgccggtgctccacgcggatgccctgctccgcggcgcggctgtaggtgatgccgatgtccgcatcgccatgcagcacgatgccggtgacctcggccggcgacgccacgcgcacatggaactgcaggcccggatagcgctggcggaattcggcaatgatgcgcggcaggaactcgatcgcaaaccccgccgagctggccacccgcacccggccccggcgcaggccctgcagcgcggcaatctctgacaccacccgatcggcttccagcgcgccgcgcagcgcataagctgccagcaactccccggcggcactcgccaccataccacgcggccggcggtcgaacagcggcacgccgagcaacgcttcgagcgcgccgacctggcggctcacggccgacacggtgacattcagccgctgcgccgcctcggtcagcgagccgctgcgtatcacctccaggaaatagcgcagcgaggtttcctgcaggcgatgcgacagcatgggcggctccgggggctggtttgcgttttacgcaaggatatttgaaaaaatcatcgattgcgggaaaccgtgcgccgcccgtatgctttttcccgacaccacaggagacccccgagccatggcgcccacccggacccccgatcccatcaccgaactcgatgccgtcgccctgtcgcgcgccatccatgcgcgcgaggtctcgtgcgtggaagtgctcgatgccttccttggccagatcgaccgccacaacccgcgcgtcaatgccatcgtggctccggtggagcgcgacaccctgcgcgcgcaggccgccgggctcgacgccgaactggcacgcggcgccagccgcggcccgctgcacggcttcccgcaggcgcccaaggacatcagcccggccgcgggcatggtcaccaccaagggctcgccgatcttcgccgggcaggtcagcgagtacgacgccgtgatcttcgagcgcatgcgcgccggcggcgcggtcttcgtcgggcgcaccaactcgccggagttcggcctgggcggccatacctacaacccggtctacggcaccacccgcaacgccttcgacccggcgcgttccgccggcggcagcagcggcggcgccgcggtggccgtggcgctgcacatgctgccggtggcggatggctctgacatgatggggtcgctgcgcacgcccgcggcgttcaaccacgtgtatggcctgcgcacctcggtcggctgcgtgccgcacggcccgggcgatgaggtcttcttccagcagttcagcgtggccggcccgatggcgcgcaacgtgccggacctggccctgctgctgtcggtgcaggccggcttcgacgcgcgtctgccgctgacgcaccgcgccgaagcgcccggcaccttcacgctgccgcccgaacgcgactgggccggcgtgcgcatcggctggctgggcaacctgggcggccacctgccgaccgaagccggcgtgctagatacttgcgagcaggcactcacgcacctgcgcacgctcggctgcaccgtggacaccgcgctgcccgagttcgacctggagcgactgtggcacgcgtggatcgacctgcgcagcttctcggtggctggcgccaacgcggcgctgtaccacgacccggccaggcgcgcgctgctcaagcccgaggccgcatgggagatcgagcgcggcctggccctgccgggcacgcgcgtgtacgaagccctgtgcgagcgcagcgcctggtaccaggcactgcgctcgctgttcgagcgcttcgactacctggtgctgccggccgcgcaggtgtttccgttcgatgccgactgggactggccgcacaccatcgacggccgcgacatggacacctaccaccgctggatgcaggtcgtggtgccggccaccatggccgggctgcccgccctggccgcacccgccggcttcggcccccagggcctgccggccggcatccagatcatcggccccgcgcaggccgacgccgccgtgctgcagctcggccatgcctatgaccaggccggcggcttctcgcgcgtgcgcagcccctggctcgattgagccttcggctggtcccggccccgcttcatattgcttccgattgccttctattcctacaactgccggcaggagtgccaacgatgaccgcaatgcccccgaagccgtttctcgcctgcgccgccgccctgaccgcggtgctgtccgcaacgcccgccgccgcgcaggcccaatcctggccggaccgaccgatccggctggtggtgcccttcgccgcgggcggcgccactgacgtgctgggccgcctgctggcagtcggcctcggcgaaaagctcggccagtcggtagtggtcgagaacaagcccggcgccagcaccgtgatcggcgccacccaggtatccaaggccgcgcccgacggctacacgctgctgctggcggccagcaccacgctgacgctgaacccggccatccgccaacacctgggctacgaccccatcaagagcttcaccccgctgggcctggtcgccgacatgagcctggtgctggtagccaacccggacacgcagatcaccacgctcaaggatctggtgacgcaggccaaggcgcaccccgacaagttctcctacggctcgttcggcgccggctcctcggtgcatttcggcgcggagatgctcaagtccgccaccggcatccgcatggtccacgtgcccttcaacggcagcgcccccagcctgaccgcgctggccggcggccaggtgccgatcgcggtcgataccgtggtggccaccctgccgctgatcaagggtggcaagatccggccagtggcagtgctgtcgccgcagcgactgccagcgctgccgcaagtaccgaccgtcgcggagagcggctatcccggcttccagatgggcacgtggttcgcgctgctggcacccgcgggcctgcccgcgccggtgcagcagaagctggagaaggcgctggccgaggtcgccaatgcacccgccaccaaggcacgcatggtcgagctggcgctgacgccggcctacggcaatggcgcggcggtgaaggcgcgggtggagaaggaattgcctgagatgcgggcggtggcggcgcgggcggatattcgggcggagtaacgagatggcgggccggccccggcccgctgtggcttactccagcacgcgcatcgtccgctcgccgtccggtgccaactgatgcagcactttgcccttgaaaacggtggccttcagatcgtccagcacgtccttggcgccaccataaggggcgaacacgtcgatcaggaacgccttgtcgcccgacttccaatccccgggcgccaattggtacggcggcatggcaaaccgctcgaccacagcgtcggagaggtaggcccaggtcacgaaggctgtgggcatttcaccccgcatgtacagcttggcctgctccaggatcagcggcggcatcacgcgccactccaggtcagcgaagaagctgtggcgcgtcgttggattgttcatcatcagccaagacaccgggcccagcagcgggatcttcttgatcacgcgctgcgcttgctcggcagcaaacttcatcagctgttcgttgtcggtcggaatagtcattggatacttgtcctgggttgtttcatgccggcagcagcgggcatggcaggcactgccggtgtttcctgctgcgcattgttggtcagcagcgcattcactccctggacatccgcctcagtcagcgtgccggccgccgccttcagccgcatgccttgcaggatagtgtcgtagcgtgcctttgcgagatcacgctgcgccgcaaagagttgctgctcggcattgagcacgtcgatgttcacgcgcgtgccgatccggtagccaattttgttggcattgaccgaatccaggctcgacgtgaccgcagaagtcagcgcctcgacctgggacaggccactcgtcacaccaccataggcttgccgtgcctgcgtcgccgcctggcgtcgcgccgcttccagctccgcgcgcgacttgtaccgattggcgattgcctcagtcacgcgcgagttgacggcgccgccctggtagatcgggatcgtcagctgcagcccgatggtgccggacttgacccggttctcgatgtccgcgggcgaggtcatcgaacctgaggtgtagttgttgccatagccagccgtgaagtccagtgtcggcaggtgcgccgcgcggttcctggacacctctttctcggcaacttcgaccgctgccaactgcgtgcgcacttgcgggttgttctcccgcgcgtgacccatccaggcattgacatccttcggctcgggacccggcagggtcacgtcagccttcaggcccgctacaggctcgggcaatggcccgaccagccgttcgagttccgcctgcttcgcctcctgatcgttgagcgcctgcaccagctgcgagcgcccaaggtcgtggcgggactgcgactcgtatacatcggtaatggtcgcctcgcccacgtcgtagcgacgcttggcaagcacacgctgctgctccactgcccgcaattgcgccctggcaactgtcacgctgtcgcgcgcggtcagcagatcgaagtacgcctgcgaggtgcgcaggatcaggtcgctctcggcctgggcgaactgtcctggcgattgccgttgccgttcaggttgatcgagggcagcacgccggcgcgagcctgcagcagcttctcgcgtccggcctccagcgcgtagcgtgatgcctcgaaggttgggtcgcccccctgcgccatcctgtagaccgacagcaggtcgatggcgctggcctggctcgggacaagagcgccgaccgcggccagcgcagccacagcagcgctggtcaaatcatgcatgcgcaccatcaccgctcccgcaaggcttcatccttgtagcgcatcagcggcgacaggaagtaggaaatcatgcggcgttggtccacgcggatatccgcggtcacgctcatccccggggtcaacgtccccttgcgcccattgactgagttcggcgtggccatcgtgtcgagcttgatgcgcacaggatagatggggccaagcttctgatcattgatggcgtcggtacccacccactgcacttcgccctcgatatatccgaagcgggtgaagtcaaaggtttccaccttggtaatgacccgctggccgcgcttcacgtagccgatgtccttgttctgcacctgagcatccacttccagtgcagtgttctcgggcaccacgatcgccaccggctgcgcctgggtcaccacgccgccaacggtagtcaccgccagttgctggacgatgccgtcgatcggtgcgcgcagcgtctgcaggtcacgccgcatcgttgccttgaccagctccagctcggccgtggcagacttgcggctttcctcggccagctctgccgcatgccgtgcgctgaactctgccaccgcctgtgcgcgctgctgctgcgcggcgttgaggcccgcgccagcttcggccagccggttggtctgcagagccagttccttcctgaggttgatcagctccagccgcgtctcgatcaggccggtttcggcgatatgcccggtcttgacgagttcctcgcgcatgtcgttcttcttgctgacaagcggcaggctggcgcggatctgctccagactggcagcggccccttcccggtcggcacgcttgcgggcaatttcagcgtcgagcgccgccagcctggcgcgttgttcggccagcgcgctggtgagcagcgcctgctgcgtccgggcgatatccgcaggcaagccttcgacggcctgcatggtgggcttgccgtcgagaagcgcagtcagccgtcgcaccccggctacggcctcccattgatcgcgctgcagccggtcacggtctgctgcagtggtggtcgggtcgagttcgaccaggatgtcgccagccttgaccttctcaccgtcgcgcacatggatctcgcgtacgatgccggcttcgagcggctgcaccaccttggacttgcccgagggaatgacttttccctgcgcggagaccaccacgtccattttcgccatcgtggcgtagaccagcgcaaggacggccataccgcagatactgccagcgacgatccgtgccatgcgcgcgggacggcggttggcgatgcccatggcggccgtggcaaaggcatcggctgccgcttgctggtcaggcttcatcggctcagacatgagcggctcccggcaacggttgcacaggggccttgtgcttgatagtgagggtttccagcacacgcgacgcctcgaacaaggcgcgatacttgccctcgccagtgatcaggtcagtgtgatggccttgctcgaccagttgcccgccatcgagcaccaggatgcggtcggccaggcgcagcgtggagaggcggtgcgcgacgataaagacggtgcggcccgcacagatcttctcgaggttgtcgtggatgacgcgctcagactcgtagtccaggctggcggtggcctcatcgagcagcagcaggcgcgggttggtcgcaagcgcccgcgcgatggcgatgcgggcgcgctggccgcccgacagcaggctgccgcgctcaccgatcacggtgtcgtagccttggggcaaggcattgacaaaatcgtgtgccccggccagcttggcggctgccatcacggcctccagcgacaggcccggatcggagatggcgatgttgtcgcgcaccgacatgttcatcagcgcggcgtcctgcgacaccacgcctacctggctacgcagccaggctgtgtccaccgtcgccaggtcgagcccgtcgatcgtgaccgttccaccagtgggtgagtagaggcgctgcaactggcggatcagcgtcgtctttccggcaccagaaacgccgacaacgcccacgacttccccagcggggatggaaaaggagacatccgacagcacttgggcgccgtcggcctgataggcaaagctcacccggtcgaagcggacaaagccctgaatcgctgcccgttgggtctggtccgaaagctggcccgcctcggccggcgtatccatgatgccgcccagccgcctgaccgccacgcgcatctgctggaattcctgccacagcgacgagagcttgatgatcggtgcattgacccggcccgacagcatgttgaaagcaatcagcccgcccacggtgaggttgccgtcgatcacctgcatggcaccgacgcccagcagcaccacggtcaacaccttgctggtcagattgatgacctggttggtccagttgccggtatggcccgattcgaatgcggctaccgcgtagcgcaccagccggctttcccagcggcgctgccagttggcttcaacggcctgacccttgagggtctccatcgcgccgatggtctccaccaggaacgcctgattgtcggcgcccagtgcgaacttgtcttccagcttcttgcgcaggatcgggctgatcacatacgacgcaccaaagaagatcggcaggaagcagatcacgataatggtcaggagcgggctgtaatagaacatgaccgccaggaacaccagcgcgaagaacaggtccagccaggcggtcagcgcctgcccggtcaggaagttgcgcgccgtctccagttcgcgcatcgaagccatcacgtcaccggcgcggcgcgagttgaagtacgacatcggcaggcgcatcaggtgccggaacaggcgcgcgcccagttcgacatcgacgcgattggtcgtatgggtgagcaggtactggcgcaggccattcagcatcgcctcgaacagcgccacgccagccagggccaccagcatcacgaccagcgtcgcctgcgagcggtgggccagcaccttgtcgatcacgacctggaaggcaagcggcgtcaccagtgcaaagagttgcacgacgaacgatgccagcaagacttgggtgagttcggttttgtacttcttgatggcctgccagaaccatgcaaagccgaacgccgaggtgccggcattggccgtgccatcggtcagggatgccacgctgcggccggcttcgatccaggtattggcgaactcgccggcgaacgccgccgctggcactgcctgcggtggctggtccgggtcccgctgcacgtggacgacatcggcatccaccttgccgaccagcacaacccggccactgcgggtcagggccagcgcgggcaatgctgcgcgacgcagcttgtccaccccgccctcgaccaacctggcgtcgaagccaaggtcatccaggccccacagcagccggctggcgtcaaagtcatcacgcacgtcccagcggcgtgcgaggccctcgggatcggccttgacctcatgcaggcgcgcgaatacggcaagcatgccaagattgggcagtgttggcttccgattcatggccgcccccgtgccagggccatcacagcccgaagcaatgcattcatcgttctatcccatcgaaaaaatcaagcgctcccggcgggtggcgtgtttctcccccgcgggatagtttttattgccaggctcagtgactgcgggccttcatatgccgaatatcaaggtcatgacggttggcccatgcccaagtccaccgcgctggcctgtgcggcgcggtccatcatttcggcaagggtgtcctcacgcggagggacaaagccgccaggggcctgagacccatcggccgtcgtcagcagcttgttccactggaggcaactccattgcacggcttccgcgctgtgcggcggatagggacaagctgaagatggcgtctcggcggtggcgagcagctgtgccacggcgtcggcggcaaaggcagcatcgatcggctcgttcggcgcgattccctgctggacctcttccaggtacagggcgaagccgggcagcggcacatccttgccagcgaacatcacgtctgcggcctcactcttgctgccatcggtgtgcgtgacctccaccgtgccgaacacgacgttgccatgatcgaggtgggcctcgccctgtcgctggagtgcgatggaggcaatgccagcctgatccagtgtcttgtgctcggcctcgctgaactcgccattgccattgacgtcctgcactaccttgaactggctccaggcagcgtcttccttgctgatcctgccgtcgccattggtgtcgaaggtggccagcgcctcaaggtctgtcttcgtgccgggcgcgaaattggtcaggcgcgtctcttccacaatgatcttgccgtcgccgtcggcatcgaagcctagtacgccgtcggtcgcggcggcccatccgatttgctcaggctggccgtcatgattcgcgtcggccctgacgttggattgatccgccgctagcaactccacgccgttgccattcaggtctatcacgaggggcgtgtagccgccacttgcattggtgcccttgtgggtagcgttaatcaccacgtccatgaatgccccctgagcatcggcaatacggatggtgaaggcgtcagtaccggtgtaagggtctcccgcatggctctcgtactgccagttggcatagcggctgacgagctcacctgagtgttcaaagccatattcggtttcccgataggtgttggcataggcgtaaccgtgttgcggcgcctgaacaatcgatatgacaatggccgctgtatcgccatctggatcgtaggcaatgatccggcccgtttctcttcggggatcattggcggggacaagaacccgatctgactcatagcttgcccccgcgaaaaagtagtcgccatccatctggtctagtgccagtggcttgagcatgccattctgatagtgcgatggtgtataaggccgcccgccggcatcaaacagttggccttgcaagttcagcgacaaggccagtgcttcgtcatagactggctgaaagacagggccatcactgtatacatactgcccggcagagcccgcacctgcacccggagcagccttgcccaccacgaccggcgggccgacgtaatacccaaagatggcgcgaccatactcgacggactcgatgatcggcgccttgttcacatgctcaacatgcaggaaggccgtggcccaggtctgccctccgtagggatcggacaccaggtactgaaaggacgcttgcccatagaagtcgtggtcaggcgtgaaccggacttggccatcggcctggatctcgaccgtaccgtgctgcgcattggcaacctgggtgactgcgagcgcgtcgccatccgggtccgcgtcattggcaagaaattgcgccgtattgatgacgaacggcgtgttctcatagcccgagaagccatcatcaaccgcgaccggtgtcgtgttgatcttctccaggttgatggtcgtggtcgccatggcaaagccgcctacaccatccgagatggtgtaggtgaagtggccttgtgcacccgggtagccgccaaagccaggctccggcaggaaggtcaccgagccgtccgcattcagtcgcacagtgccgtgctcggccccggacacgcccacaatgcgcagatcgccatgcgggttgtcgatgtcgaagtcatccgccaacaaggccgccgcggtcagcgtaatggccacgcccctgcgtccgtccacgatattgtcattggcgatcggcgcatcattgactggcgccacgtgaatagtcgccgtcgcggtcgagacgccccccacgccatcgctcacttcatacgtgaaactggcatcaccaaagaaatttggatcgggcacaaaacggatggtcccgtccgggttcagcgacacggtaccgtgcgtggcgccgttgacgcgggtgatggaaagcgcctccggtgggttgtccacatccgtatcattggcaagcagtgcggcgacatctatggtcagcgcggtgtcctcgttgctcgcaatcacatcgtcgcgcagccgcggagcatcattgacgggagccaagtcaatgtccacccgcccggtggtgatggcgccgtgcgggtccgacacggtgtattcgaagctggcggcaccgaagtaatccgcttccgggataaaggtgacggctccgtcggcattcagacgcacttcgccgtgctgggcgttgccgaccgctaccagcgtgagcgtggcttgcgcatcgtccacgtcccggtcattggcaagcaagctggccgcggtgaaggccgctacctcgtcctcattgccacggaagtcctcgccagtcacgatcggcgcgtcattgaccggcgccagatcgaccgtggccatcgcctcggtatagccgcccgcgccgtcgtagacggtgtagaagaaggtcgcggtgccgaagaagtcctgctccggcacgaagcggatctgtccttcgggggtcagctcgaccgtgccgtgctggccgttgcgcaccgagaacacggtcaggtccgagtgggggttatccacgtcccagtcgttggccagcagcgtcgcctgctcgatcagcagtatggtgtcctcgtcggtggcgacggtttcacccgccaccaccggcacgtcattgacggggcggatttcgaggttgacggtagcgggcgtcaagccgccgttaccatccgacacccagtagacaaagctggccggcccgaagtaatcctggtcaggcaggaagcgcacgttgccgtgggcatcgagggccaccaggccgtgcgtggcattcgaaacacgcaggatgctcagcacgtcgccgatggtgggcgtatccacatcgaaatcgttggcaagcagctgtcccgaggtgaacagcaggccggtatcttcatcgaaagcggccgtttcaccggcagtgaccggcgcatcattgaccggcgcaatgtccaagtagacgcggccagtcgcctgcaggccatactcatcctcgacggtgtagcggaaacgcgccggcccccaatagtctgggtcaggggtgaacacaatgcgctggctgccgtcgggcagcagtgtcagggtcaccgtgccattctcgccgccgtagacgttgatcaggcgcagtggctgggtcaggacgtcgcgcgaggtatcgttggccagcagcactgccgcatcgatggcatagcgcgtgtcctcgatgcctgcgacctgctcatcggctacgtccggcgcgatgatctgaatatcctcgccgttcggcccagctgccacgcggccgggcgttgtggtcaggatcgtatcgtcacttgcggcatcgtaattgacaccaaccgccggcactgatctgatcagatccaaagtgacttcgactggcgacccgagcgttgcctcgctgccaaccgggcgcgtcgccggtggcaaggcgttgactggcacctgtacaaagggcggctgagccacagtcggttgcggctggtccggcgaatcaaccgtcgttccaagttccaccggcaggcggctgatggtgttgttgccggttgtatcgatagcgggggctggcgcatcaggctgcccgccaccttctgccgcgttggcaacgccggtcacggcacccgccgcgacacccagcagcgcgccggtgcccgcaaacaggctgtcgctgctcttgatccactgatcgcggatcgcagcgaaggcatcagttgggctagctggcggagcgctggtaacacggccgtccgccgggcgcaccgtgtcagtacgctgcgcaggcctgccgggatttgggtccttcgaggtcaggcggctgtcatccggctcgacacgggtggcagtagcccgcccgaccggggtcgtgccctcgccatcagccacgcggtcatcgccagcgacgatcgcgtcttcggcaagcgtctgctcgtgctgcttgtcgctggcggttttgatgcgactgtcgccttcggcaacttgcatctcagcgctggcgtcttccaaggctacgccgccatgggtatggccagcttcgcccgtgtaatcatgagtgacgacggcattcaggaccgtctcgccgccttccttcgcgtgcagcatgccggcaaaggcatcgagccggccatcgccgtccgtgtccacaaacgccacctgataggcgtcgccgcgcacatccgctgtcaggtggtgctcggtgaccatcatgacgctgccatcggcggcgcgcaggacgggtggcgtgctggtgaaatccaggctggcgataccccggtcgaggaacgatgcgaactcgccctgatcggtctggccgttgcggttaacgtccagccagatgcccagggcggcaaaggccgggtcggaagtgtccagcttgccgtcgtggttgacatcgagccattgcacgctgttgcgggcatgggcggcggaggcatccgggtcgttggtcaggatctcgttctgcccgatcctgccatcgccgttcacatcgatggagaggatgccctggttggcgttcacccagtccgtctgctcgatgtagccgtccagatcgacgttcttgccgatccggccagggttcacacctgcaggcagttccggcttcaggtcgaccgtcagcgcagtaaaatgctggcggatgccgtcagcgtctgcctcaggcatgcctgcgtcggccttagcctcatgccaatccgggctgtgcagttgcaggccagctcgcgaccggttctcttcaatgctgcccgttgccggagcagtgacgacgccagattcgcgcatgtgggcgagcaccgattccgcttcccaggccgggacgatggcagcgaacgcctgctgcatgaactgctgcgcaatggtcgcctggctggtgtcatagcgcaaaccagcgccatcatagtagcgtctctgctcctggccgttgtcgtcgatccacttgagatacagctgaccgccgttatcgttcaggcgcgccccatcaggatcgaagagatagccgatggtcggcaggcgctgtggaatgatggcgtaaagtgggttgccgttggcatccacctgctgggcaagcgacacctgcagggcgtcgatcaggctttgcaggatgttggcaggcgtcgcgccgccgtcctcggcatcggtggtcttgagcacgtgaatgctgccgtccggattccacacagcggtggcttcaccttctagcgtcggaagatcctttgcggacagcattgagccgatcattgtcacggcgatagccgcgaaggcaacaggtgggcaataggaggtatagcctgccaccgtcatgcccgcagcgatggtactcagtgccgccccggcaacctgatactcattgccatcctcgatggccattaccagcgtgacaatgcttgcgaccagcgccagcccaccagcaatctgccctgtcgtcgcagcgctatccagcagagtgccagcggatgccgactcagcctggaatgcaacaattccttgttccttgagcgcgttggcgtagatggctgccgcctggctgccgaggttggtactggcagcagcgatgcccagtccgttgccgtcttgaatggcgttgaacaggttcaggccagcagcgagggcattcagtccgacgccgacgccatcgggcaaaagtttgccgctgccgaggcgatccagattgatcagcatcgctgcgctggcggccacaatcgccttcgtgtcgccggattcgattgcctggatcagggacagcatgctttggacgctgccaagcgcgtccacagggcttattgcctctggcacgggtgtgggctgcgagtcaggccgcgtatcatgctcgtcgaatggcagaccaccgatagctgggcctgtcaggtccagctcaccgcctgcgctaacagtgaccatctcaccatgcaagccagtaaggcggacattaccgtcgtcggttgccacagtagcaagcacattgcgctgcccatccaccagcactagtgtgccgtctccgagagtgtagagggtaacgtccctgccatagagatgctcaatggtgccttgccagtgggcggcccgctcagcaaaagcctgatgttgagcggcaagcatttcctctgtaggcgtagctgcatcggaatgcgtgccactatggtcagcaagctgaatgcgatccccaccaagcccagctagcgcattgccaacaccgatagcgccgcgggcgtccgagaacggcaacctatcgagcaattgcttgaattgatcttggacatgactgccaatttcccgcaaggtattggctgcatccactcccatggattcgaagaagcctgcctggtcgattcgaccaacagcatccatgaaattctgcaactctttcccggacgctatgcccggtgccttttccagccaatcgcttgccatggcgcgcaccaccggatcaggcgaggtcgatgcgccgtacatgaacgccagcgtggcggtgttggccgcaagtgcgtcgctgtaaccaccacccgtgtcgcgcagcatgctccagaaccgctcgacttgtgccgggccacccattttctccatcaggcggaagggggtatctagggtccaggcggaagggggaagaccattgtctttgaagacctggcggtgaaagttccagacttccctgctatcgatgtcacgtgtgacaggcagactaccgtcgatagtctgttgatacagcgcatcaagatagccttttgccatgtccagcttaatcttctcaacctgcgccccagtcaacggcctccccaggtccttggcagtgttgtgcatatacgtcagcgctgaggcgccggcgatactagtggcgtcggccacaccaccggcccagcctgagtacttgtatccgtagccttcgagccggctatagacttgcgacggagtaagcgtgcctgcgttaagctgaaacctaatatctttcaacgaccgtgcagatatcggatttggcatgagcagaccgtcttatcgctgttgaagagtaggcgtggcggcgggctcgccgggctgcacccggaaacctaggatcaattcacgtgccttacgttcgtattccatccactgactcaacgtacgggcatcgtattggagattcacttcggccttcattgagggatagagagaaaagcgatggatgcagacattgcgcggactttcctcgaacggctccccatttgcgttgcattcaatgaatgacacgtccttgccatcattcgtaaagaagaacaggcgatccctcgatacaacaggaccactcggataacgcacaatctcttcggatctgtactcggctagtccatagcgtgtctcgggctgccggtcgtatcgcctattgcggaacctggcaagccccttaactgtgacatgctgatcgtagggattgcctagcaccatcttttctttatgtacgttcagtgattgattggcgctcaccccaatcggcagccattcctctggcccctccatcgacttctgcgctcggtagtaacttgcctcgttcgccgccgtcctcggcgcaaagtccggcagatgcaccatcaggggtagtgaattgatcttcgaagcaaaggtgcgcaccggcgccttccagttgcgacgctctggatcaaatacactcggatctccttcgtactcggtcaccaagtgggtgtagttcagcgggacggaaaccggcacaccgccaaggtcaccaataatcggatcacgtccccgtggaagatcaaagggaccggcccatgcagccaagcgcgcattaatggccaccatagcaactgcaatgagcagcaacataggcgccgcatacatcaggcagcggcgaactgatcgtttcattgatgaactattcaacatactgcagcctactctttactctcatgatgagcacatcagcagcaccccaaaaatctgattgcggatatcgtctttggcatgtaatcgttccttactctcaaagcttgagtgcaacgcactcacccaaggccaccagcgaaccgaaacttgggagagcgctggaacaggcccctaagaatcccggcgcacgcatcataccaaatccactttccggatcatgcgggaatattccccaagaactaccggaagattcggaaaataaataataagatcagaaattaaattctctaataccagtccggggatcgagtccatgctgggtcgcgccaggataccgcgagcgatccggcccactcctttgtttatggcaattgtttacatttgctcttgacatgtcctacagcgcgctcttgaacaactccagcggcacacagtcgcgatgcttgtcgttcggctatattgcagcgccgccctcagaatgggtcgtggccgagcctgtgcagtcgatgccgggaatagcgttgtcgcgggccctattgcacatgcgccgcgaaccccactgcccccggctcaacctcctcacgcagcgtcagttgcggaatccggtagtcccccgcgttctgccgccggaaggggatcggtgcggtcgtccccagcatatccagccgctggcccaattcctcgcgaatccccgcaaagcgcgcctcatcaaccttgctggtccgatacaccaggtacggcggcagcacgtcagacccggggtagtacaggattccgtgatggatcgggaacaggatgtcgtcgatcgggccattgatcccgcgcgggctgtagtgcgactcccagccgccggtcgtgacaatcagcatggcacgcttgccggcgaggctgccctcgccatagcggtcgccccagcgctcgtcggagtgctcacccacgccgtaggcaaaaccataggcatagacgcgctcgacccagcccttcaggatggccggcatcgagaaccaccacagcgggaactgcaggatcacggcgtcggcccagcgcagcttttcctgctcatgcgcaatgtcatcgctctgcagcccgttctcgaaggcgtgcttggaatccagtgacgggtggaagggtgcgttgcccggctgcgccttggtgtcggcgccgtcgagctgggccttccactgcatcgcatacaggtccgagacctggacctggtgcccggcatcgcgcaagcgctgcacggcaaagtcgcggatcgcgccgttaagcgacctcggttccgggtgggcatacacaagcaatacgttcatgacagcggcttccaatgattgagtgaacccagcataggccgtcgtcagctatattagaaatgaatatccaatatcccaggtattgtcatgaataatctcagacggctggacctgaacctgctggtgacgctggatgtgctgctgtccgagcacaacgtgacccgcgcggcgcagcggctgcacctgtcgcagccttcggtcagcgtccacttgtcgaggctgcgcgattacttcggtgacccgctgctgttgccgggcccgcgcggcatgcgtcccaccgccaaggcggaatcgctgcgcgaaccgttgcgcgaagcgctggccgcgctggagcatgcggtctcgtccgatacgccgttcgatcccgccgcctcgacccacacctggcgcgtggctgcgaccgactacggcgaatcgaccatcgtgctgccggcgctgcaggcgctgcgcatggcggcgcccggcgcgcgcctggccgtggtcgagatggtgccgccgcgcatcgcccggcaggccgagcgtgccgaactggacctggccttccataccaccgatggctcgccgccgggcctgcaccggcgtgcgctgtttaccgagcgctatgtgctggtgggccgcgccggccatccgcggctgaagcggcggcccacgctggcgcagttctgcgcgctcgaccatgtgattgtgtcgccggacggtggcggcttctacggcgtcaccgacgaggcgctggtactggccggcatgcagcggcgtgtggtgctgtcagtgccccacttcctgtttgtcacgtcggccgttgccagcaccgatctggtggcgatgctgcccgagcggctggtgcgcggcgtgccgggactgaaggtggtggaaccaccagtcgaagtgccgggctatgagatgtcgatgttgtggccagagcgcgtgcatcgcgatccggcgcatagttggctgcgtgaactcatcgtcacatcggtctgagcggcgctgcctcgcacgtttgcatacaaaactggaatacaatcagctctttcaacgctgcggcatggggtggtacccggtgccgccccagttttggaggagaccatgacgtattcagaaacgggcctgacttcccgccacgtggccgcgctcgcgccgatcgaggattacctgcagggccatatcaccggcaaggccgagttcatgtacaaggcgtttgccgccgacgcgcgcatcgtctcgttccgtgatggcaagctgcattcgctgacggtcgaggaattcgcctcggcgcgctgccccggccatcccgcggcagacgaggcgcagcgcaagcgctttatcacgcagttcgatgtggtgggcaatgcgggcgtcgccaaggtggtgcttgaatacccgggcgtgaccttcaccgactacatgacgctgctggagatcgacggcgtctggaagatcgtcaacaagactttcagcgccgcaccgcgctgaagatgggacagctgctgcggcaaagcgccgcagcggtgcagcccaggccctgctttgcggcagcaggcaatcctgcccttcatccgctcgcgcccgaccacgcgcgccacttcggcgatcacgcagtcgttgagttgcgttcagcccggcagcaccgccgtcgcttcgatctcgaacagcatgttgtccagcgccagccgcggcaccgggatcagcgtgcaggccggcgttggcttgtcgccccacatctcgcgcagcgccgcaccgaaggtgcgcaggcggtcgtgcgagtggtcgaccaccagcaccgtgagcttggccacatcgcccacgtcggcgcctgccgcttgcagcgcgatgcgcaggttctgcatggcgcgtgccacctggcgcgggaaatcgagcggcaggcagccggccgcgtcctcaccgccctgccccgcgatatagacgatgcgggccgggccttccaccatggccacatgcgaatagccgttgggccgcgggtcgtacaggccctcgggattgatgaggctcagcgagggattggggcgggcaaccggcatggtgggcattgaaggcagcgcgggcatagaaggagaacgcaaggatgagggcgagaacgggaacatggtcatcagctctgtatttgaggcgtggcgaacaatggagtcgcaagtatcaaacctcaacctaaattgaggtcaagcgcagccttggtgttagcatgggcattcctccgttccactggtgtcttccactgccgatggcctccgcgaacaagcccccctcaccgcgccggcgccgtgccgcgccttccgaagaactgctctccgtcggcgaagtcgccgcgcgcacgggcattgccgtatccgccctgcatttctatgaatcgcgtggcctgatcgccagcacccgcagcggcggcaaccagcgccgctatgcgcgtgccgtgctgcggcgcctggccgtgatccgcgtggcgcagcgcatggggttgccgctggcggtgatcgccgatgccatgcagaagctgccggacgggcgtgcgcccaccgcggccgactggcgccggctgtcggcgagctggcgcgatgacctggatgaacggatccggacgctcacgcaattgcgtgaccagctggatgggtgtatcgggtgcgggtgtctgtcgttgaaggcgtgcccgttgcggaacccgcatgacgcgctggccggggaagggccggggccgcatttcccgcctactgcaatgtctgcaggtaagccagcagatcgctgatctgcttgtcgtcactgagcccccagaagcgcatcttggtgccaggcacgaccttgccgggcgaatggatgaaggcacgcagcgtgtcatgcgaccacaccacctttgaagcgcgcatcgcctccgaatactggaaatcgctggtgccgcccgcggcgcggccgaagatgccgttcagctgcgggccaaagcctgcgcgcgcgttgcggccgacgtgatggcacgaggcgcagcgcgtggcgaagagtgccttgccggcctggatatcggcggcagtggctgcggtggggacggcggtgaaggcggccagggccagcaggacaaaggcggtacggcgcatggagcagctagggaaggaaagggcttcggcaacgaggttgcatgatacaggcgtagccaggacgtccctgccctgcagcggggttacaccacgtcacacttgcaacacttcgcgcgccccatattacaggcccgccccctacagtgagcccatgtccaacgccccttgggaggcaaccatgaaacgaatcatcgcaatggcggtagcaggtggtgcaatgctggtggccagcgccggggcgtacgccggtgtgaatatcgatatcggcatcggcgtgccgggcgtggtggtggcccagccggcgccagtctatcgtccagccccggtctatgcccctgcgccggtgtatgcgccggctccggttgcctatgcgcccagcccggtagtggtggcaccgcgccccgtcgtggtggcaccggtcccggtacgctatgactatgaccgcggctatcgcagcgactaccaccggggctactaccgggaaggctaccgcgaaggctatcgagaccaccgccgcgactggcgcgagcgcgaatgggcacaccgtcatggtcacaatgacggccacggccacgggcgccgctgggactgacgggttcgtatggggcgggcgccacggccacggccgcggcgcccgcctgcaaggattcgccagtcaggctaccctgtcggcaatttccagatccgggccggggccatacccctgcccatgccaggagtagccatgccccaacccatcaagatcgacttcgtctccgacattgcctgcccctggtgcgccatcggcctgtcttcactgcaactggcgttgcagcgccttggcgatgcggtggatgccgagatcgtcgtgcatccgtttgaactcaacccggggatgcgcccggagggcgaggcgatcgtcgactatctcggcaggaagtacgggcgcaccccggcgcagatcgcagagacccaggccatgatccgcgagcgcggcgccggcgtgggctttccgtttggcgagcgcacccatgtctacaacaccttcgacgcccaccggctgctgcattgggcgggcctggaaggcaagcagctgccgctgaagctggcgctgctgcgcgcttaccatgccgatggcaaggacccgagcaatcacgaggtgctggtcgaagccgcgcaggccgttggcctggatgccgcggcggcgcgcaaggtgctggacagcgatgactatgccgatgcggtgcgcgcggaaatccaggagtaccagcgcatgggcatccagtcggtgccatcgatcatcttcaacaaccgctacctggtcaccggcgggcagccggtggaggctttcgagcaggccatccgggaagtcgtggccgaggcgcagcaggctggcaacagttgagccgccacgcatcggcaggataaaaaagcccgccccgaaccccgggcgggcaaacactgcctctcgctccctatctttcaacgtgccgccggcttcatccctgccggcaccgcatccgccgccagcggcgtacgattcgccagccccagcaccacctgccaggcaaacgacaccgcgccgacgataaacaccacgtcgccgaaggtgcgcacccagcgcagggtctgcaggatgggctgctgcatgaaggcctcgctgcgcgcataccaggtgccatgctcgacgctggccaggaactggatgatgccgatcggcagcaggctggtgccgatcatcagcaccaggccgaggttcagcccccagaaggcggtcttcatcagcgttgggctgagccggtaggccgggcgcacgtagcgcagcaccagcagcgtgaagcccagcgccaggaacccgtacaccccgaacagcgcggcatgggcatgcactggcgtggtgttctgtccctggatgtagtacagcgcgatcggcgggttgatcatgaagccgaacaccccggcgcccagcatgttccagaacgccaccgcgacaaagcacatcagcggccacttcaggtctgccatccacggcgcgcgccgcttcaggctccagttctcccaggcctcatggcccagcacgatcagcggcaccacttccagcgcgctgaaggcggcgcccactgccatcacgggcgtggtggtgccggcaaagtacaggtggtggaaggtgccgggaatcccgcccagcatgaacagcgaggccgaggccaggctggcggccgttgccatcgggcgcgacaccaggcccagcgtggagaagatgaaggccagcgcggtggtggcaaaaacttcgaagaacccttccacccacaggtgcaccacccaccagcgccagtactccatcaccgtcaggctggtgcgttcgccgtaggccaggcccgcgccgtagaacaggccgattgccaccaccgacgaggtcagcagcgccagcaggttgcggtcggtgccgcgcgcgcgcagcgccggcaggatgccgcgcatcatcagcaccagccagatcaggatgccggcgaacttgccgatctgccacagccggcccaggtcgacatactcatagccctggtggcccagccagaagttcaggtgggcaggcagcttctgcgcgatcgccaggtagttgccggtgaacgatcccaccaccacgaccaccagtgcccagaacaggacttcgacgcccaggcgctggtacttcgggtccttgccgccgttgatcagcggcgcgaggaacaggcccgcggccaggaagccggtggcgatccagaacagcgcgctctggatatgccaggtgcgcaccagtgcgtaggggaaccactgcgagacgtcgatgccgtagaacttctggccttcgacggtgtagtgcgcggtaaagccgcccaggaacacctggaacacgaataacgccaccaccaggaacaggtacttgccgagcgcgcgctgcgacggcgtcagcgccacggccagcagcggatcgcgtgccggcgcctgcggcggcgcgtcttccttgccgcgcaggaaggcccatgcccataccaggaagccgaccccggccagcagcaccaccacgctgattaccgaccacaccacgttctcgctggtgggctggttgccgatcagcggctcgtgcggccaattgttggtgtaggtggcttcgtgccccgggcgcgcggtcgatgcggcccacgcggtccagaagaagaagtgcgtgagttgttcgcggcgctcggcgctgggcagcgtgttctccttcatcgcgtagtgctcgcgcgtggtgtgcagcgccggcgcgtcggagaagagctggtcgtagtaggcggcggtgtcggcaatggcctgcgcgcggcgcttcgacacggtcagcacgttggtggccggatcggtggcattgccgcggtactcggtgcgcagctgctcgcgcagcgcggcctgcgccggcgcgtcgagttgcgcatagggccggccgttggcgtcctgcgcggccagctccagccacgcgctcagttcgcggtgcagccagtcggcggtccagtccggcgcctggtaggcgccgtggccccagatggagcccagctgcatgccgcccacggattgccaggcggtctggccgtccaggatctcttcaccggtgaagagcgtgcggccctcggtcgtgacgaccttggccggcattggcggggcctgccggtacacctcgacgccgtagtagccgagcagggagaacgtgaccgccagcacggcgatcagcaggaaccagagtctgcggtaggaacccatgatgcgaagtcgttggttatggtggcgggagggctcaggcgtgcgtcgagcaaccgcagccagtggcttgcgcggcggcggtggcgacctcgaacagcacgttgttttccaggtggatgtgttccatcaggtcttcgcgcagcgtgcgcaggcccaggtagagcgcgcgccaggtattgcaggccgcgcgcggcaacgtgatgtcgttggtcagcgccgccagccgctgcaacgccacgccgtggtcgtcatgctcggcgcgcatcaccgtgatcggccggcccgcggcggcatgcaggccgcgcgacaacatcgggaacagcacctgctcttccttctgcatatgcgtttccagctcgcccagcatctcgctcaggtggtcggccaggccaagcgggcaatcgggccggtcaccgtgcacctgctcgacgcgccgcgccaggcggatcagctcgggcaactgctcgcggtggcgcgcatggaagcgcgtgaggatatgttcgatcagctcggccggcgccgccgtgttccagtcctgtgccgacgacccttcgtcctgcagcgcgcgcagttgggcgtcgatggtgccgacggcagccgcatcgagacccttttgctgcgcggcgtcgcgcagggtctgcttgcctccgcagcagaagtccagcccgtagccgtggaagatccgggtggcaccagggatcaggcgggccagttggccaagcgagtggtcctgcaaggtcatgatggttgctccatgtgtaagttatgcctgcacgacttacgcgaggagcgtgcctgaaaaaaacctatccagatcaatgggttgaaacactgacggtaattaataccctatacttctcgcggtacttatcacccttacggtatttttaaccatgctaccgagcgcgatgtatcccgagttgctggccgaccttgtcaccgacctgccgcatgcggtgcgcctgcagcggctggtcagcatgctgcgcacgcatttccgctgtggcgcggtggcgctgctgcggctggaagaagaccacctgcgccccgttgcggtcgatggccttgtgcgcgatgcgctgggccggcgctttgcggtcggcctgcacccgcgcctggccgcgatcctggcgcggcgcggggtgacctgcttccatcacgacagcatgctgcccgacccatacgacggcctgatcgacgagcacgttggcgagccgctgccggtgcacgactgcatgggcaccagcctggccgtggacggccagccctggggcgcgctgacgctggatgcgctggcgatcggcaccttcgatgccgcggcccaggccgagctgcagcggctgacggtgatcgtggaagcggccatccgcaccacccggctggaaggcgagatccgcgcgctgcagctggcacgcggcacgcccgaggccgacgaaggcacggcccagcatggcgacatcggcggcgagatcatcggccagagcgaggccatcgccaacctgctgcatgagctggaggtggtggccgataccgacctgccggtactgctgctgggcgagaccggggtgggcaaggagctgttcgcgcaccggctgcaccgccagtcgcgccggcgcgcgcagccgctggtgcatgtcaactgcgcggcgctgccggagtcgctggctgaaagcgagctgttcggccatgcgcgcggcgcgttctcgggcgcgaccggcgagcgcccgggacgcttcgaggccgccgacggcggcaccctcttcctcgatgaagtcggcgaactgccgctggcgatccaggccaagctgctgcgcacgctgcagaacggcgagatccagcggctgggctcggaccgcccgcgccgcgtcaacgtgcgcgtgattgccgcgaccaaccgcaacctgcgcgagcatgtgcgcgacggctcgttccgcgccgacctgtaccaccgcctgtcggtctacccgatcccgatcccgccgctgcgcgagcgcggcaacgacgtgctgctgctggccgggcgcttcctggagctgaaccgcgcgcgcctggggctgcgcagcctgcggctgtcaggcggtgcgcaggatgcgctgcgcagctaccgctggcccggcaacgtgcgcgagctggaacacgtgatcagccgcgcggcgctgcgtgccgtcagccgtggcgcgggccgcaatgacatcgtgacgctggagcctgaactgctcgacctcgacggactggaagtgcccgcggcacaccatgccggcgccggcatggccagcgcgttcgccgccccggcgcttgctgcaggcatcaccctgcgcgacgcggtcgagcaaacccagcgcgcctgcatcgaacaggcattgaaggaccagggtggcaattgggcgcaggcagcgcgccagctgggtatcgatgccagcaacctgcacaagctggccaggcggctggggtgcaagtgactgacacactcgggtgccaggatgccgacatggcgatgcgcgccattaccgcataagctagtccgggtgtgccgcccacatgtcggcatcgccgtgtgcagcaactgccgcgctgcgcgcacgcccaccaccggagattcccgtgatgatgaccgcaatgcaaaccttctggccgctcggcttccggccgtttcccaccttcttctccggcgcgcagcaggtcgaggccatgcaggccgacctggcggacaactggcgccgcatggccgaactcaacctggagttcgcccgcaccatgtatgaggagttgcagttcgatgccatgggcgcgatcctcgcgccggagccagaggccttctatgcgcgcgagattgcctgcgagctgccgctgatcggcggcccgctgcactatgcatcggccatgctggagctgtacgcccgggcccagcagaagtggatcgatggctggggccacctgctgacgcggggcctgatgcctgactggcaagacatgcaaaaggacgtcaccgacgtccccttctggctggtccgcgaaaccccgcggccggcatgacccggccgcccccgccttgcgccgtcgcggcgatcatcccgatcggttcgcccggcgccaggtagtggcgcgcgcgcaccccttgcctgccacctgttgcatcggcgcacccactgccaagccagccgcgcagcccggtatcatgctggctgacgagatcgcggatcgccggaaccaacgcccgggtctcgggacgcgctccgccttcaatgccctcatattccctggttctcctgcttaccgtcgccgtggtcgcctgcatcggcatggccatcgccacctggccgcggcgcgacgatccgaccgtccaggcgttcctggtgctggcattcggcgcggcgacctggagcggcggccgcctgctcgagatcagctccacggacctggaagggcgcatcctgtgggccaagatccagtacctcgggatcgtcgccgtgccgatcggttggctggtggcgatggtgcacctgagccgcccgcgctatgtggtgccctggtccaggctgtggctgcccgtgctggtggccgtggtcaccgtggtgatggtcttcaccaacgagcgccaccggctgatctggccgcgcatcacgctgatgcctcccggcgtactgcccggtgcggtgttcgaccatggcatcggctatgccgcggtggcggcctggtcgtacctgctgctgggggtgagcctgcatttcctggtgacggccgaagtgcccaacggggccttgtcgcggcggggccgcgccatcctggcgtcgggcctggccttgcccctggttgccaatgtcgcctacctcaaccgctggaccgggccgctgggcggggacctgacgccggcgacgttctcgctgatggcggcgctggtctggttctgcgcgctgcgcacgcaccttgacgatatcggccactacgcccgcctgcaggtgttcgatgccctcagcgagggctgcgtgatcgtcgacagccatggcgccatcgtcgaattcaacccggccgccgcgcagctttggccggccctgcgccgcggcgacccactgccctccggctgggaaaccgcgctgcagcactcgcctgccgacactgccagcctcgcggccacgcctttcgtgccaccgggcgcgcccttcgagcttaccgtggagcgtgtcgcccgcctggacggcaggcagatcggcagcctgctgtttttgcgcgacatcagccgcttccagtcgcgcgagctggccctgaccgcgcggctcggccagaccgaagagcagttgtggcaggtgcaggccgacctggacatcgacgccctgaccggcatccgcaaccggcgctacttccagcgcgagtcgatcgcggccgtgacccgggcgtgcgagcgcagccaggcgctgggcctgctgatcctggatgtggaccagttcaagcaatacaacgacctgcatggccacgtggccggcgacgactgcctgcggcagattgccggcgccctggcccgcacgctctccggcgagcagttctgcgcccggctgggcggcgaggaattcgcggcggtgctgcccggcgccacgcgtgaagagacccgtgacgtggcgcgccgcatggtggccgttgtgcgcgatctcggcatcgcgcacaacggcacgccggtgcagccggtggtcaccatcagcgtgggcgcggtctggaccgtgccggaagcgccgcggctggagccgctgctgcaccgcgccgacagcgctatgtaccgggccaagcgcgcgggacgcaaccgcttcatgctggacggcgacgcctgagcggcacggctacgacgccgcacctgcccgccccacggtggcgccgtgcaaggccaccagccgcgccgccgcctggctgacccatgcgggccgcggcgcggcgtcgagccagtacttgacctccaggcccagcgcggtatcgccgctgatcaccagccggcgctggaagaacagcgtgtcggtatcggcctcgccgcccagcaggcgcaggtagtcgaccgcgcaggcgcgcagcgtcagctcagcctcggcgtccgctgccgcggcacgaaagcgcccgccttcgcagcggaacggcacggccagcccaaggtcctgcaccgtcagcaggaaggcgtgtccgtccagtgcggccggtggctccagccatcccgctcggcgcgccagctccagcgccgccaccagcggcagcgccctggcacgggcgggcatgcgccggtgcacgcccgcgatcagcttgtgcagcgcgctcatgcccgggcctcccaggcgatgcccgcgctgcggtgccagtagccgttgcagggctgggcgccggtcggcgtgatgccgctggcagcgggtgcctgttcaccagcacgaatcgccgcgagctgttgcaccacctgcagcgtgccggatgaatgcgggctcacgcgcagcatccccacccccatccgcgccatcgccaacgcctctgcgcacaggtccaggcaggtggcgctctgcgtctgcacgccgttgagcgtgaagaacgcctgcccctcgccggtggctgccaccaggccgtcgggatagtccatgcagcggaactcgcaactgtccttgcgcaggcgatggtggcgcgcggtaaagcagcgcgccgagaacgccagcggcagccggccccagacaaaggcttccaggcgcatgccggtggggcgcgccgctgccagcgcggccagtgtggcgccatccatctccaccggcgcgacgcagccggccgcgcccagcccggccagccacgccagcgtatcggcgtggtagacattgaggtgggggccgccgacaaagggccgcccttgcatgcagcgcaccgcgccaaggtcgttggcctcgaccaggtagtcgtcctgggcgcaggcgcggcgcatccaggcgatgtcagtgtcggactccaccagcaccggcgtggacagcaccacctccttgccggcatcgcgcagcatttgcgcaatctccagccattgcgcatggcggacttcatggcggcgcgtgcagacggtctcgccgagatagacgcggtcgaccggcgcatcggcgaccgacgcatagaactgcatcacggcctcgcgcggccagtagtacagcagtgggcccagggcgatgccgaaggcgggcatcgctacggtttgcggcatcgcggccgcggcaatctctggcatgggaagctccgtcatggccggttcaaggcagatcgatgtcatgggtgtcaccgccacggccggtcataggcgccttgcgtgacctggtcgccttcggcatggcgccccagcgtgctctgccactcttgccgcggcacgaagcgtgccggatcggcgcaggccgcgtcgatggccgcgcgcagcacaccgaccacatcgcccacatagcgcgggctgcgctgccggccttcgatcttgatggcagcgatgcccatgtcgatcagcgccggcagcagcgacagcgcattgaggctggtgggctcttccagcacgtagccgcgctcgccctccacctcgaagcggcccttgcacagcgtgggatagccggccggctcgcccggcgcatagctgtcgatcaggatgcccgacagccgcgcctgcatggtgccgtcctgctcggtccagcgcaccgcgtgcgcgggcgagcagacgcccttgttgttgggcgagtcgccggtggcgtaggacgacagcaggcagcgcccctcggccatcacgcacaggctgccgaagccgaacacctccagttccacgctggtctggcgcgccagcttgccgatctgcgccagcgacagcacgcgcggcagcaccacgcggcggatatggaagcgctcgcgcatcagctcgatggcgtcggcgtgcgtggccgaaccctgcaccgacaggtgcaggcgcaagcccggatggcgctcgcacgcatagtccatcaggccggcgtcggccatgatgaccgcgtcggcgccaaggtccgccgccgcatcgaccgcgcgctgccattgggccaccgcgcccatctgggcaaaggtgttgatcgcgaacagcacctcggcgccgcgcgcgtgggcttcggccacgccggtgcggatgtcggcctcggtaaagttcaggccgccgaagttgcgcgcgttggtggcatcgcgcaggcccaggtagaccgcgtcggcgccgtgctgcagcgccatgcgcagggccgccagcgaaccggcgggcgcaacgagctggggccggcgcggcacgttcgccgcggtggatggagctggggaggcaggggtcatcggtgatggcgccggcggcggcgcgaagatgaagacagccgccgatgctagccaagcgcttgcagcaggggcttgaccgcgcgcaaacccacgccaaccgcacaccgcccgcgccggcctatgccggtcggcgtaggccgatggcaggccaccaccgcgcgcttgacctgcggcaaacgccggcacgtgccgctgtgccacgcttgcccggtcatccacgcggctggccgcacgccggccccgcgcccatcctcttccggagattttatgaatcaaccctggctcaagctggccggccgccgcctgctgcccatcgtgcagggcggcatgggcatcggcatctcggcccaccggctggccggcgccgtcgcgcgcgagaacggcgtcggcaccatcgccagcatcgacctgcgccaccaccaccccgacctgatggaacgcacccgcggcagccgtgacaagcccgccatcgaagccgccaacctcgaagcgctggatcgcgagatccgtgccgcgcgcacggcgtccgagggccgcgggctgatcgccgtcaacgtgatgaaggcggtgggctcgcacgccgcgctggtgcggcaatcctgtgaaagcggcgccgatgccatcgtcatgggcgctggcctgccgctggacctgcccgaactgaccgccagccaccccagggtggcgctgatcccgatcctgtccgaggcgcgcggcatcggcctggtgctgcgccgctggatgaagaagggccgcctgcccgatgccatcgtggtcgagcatccggcccatgccggcggccatctgggcgcggccagcatccaggacctgtcagagccgcgcttttcgttttcgcgcgtgctggccgaatgccgcgagctgtttgcgcagctcgggctggcctgggacagcattccgctgatcctggccggcggcatcgacagccatgccaaggtgcgccactggctgggcgagggcgccgccgcggtgcagctgggcacggccttcgccgtgaccgaggaatgcgatgcccacccggccttcaagcaggtgctggccacggcgcggcccgagaccctgcgcgagttcaccagcgtggccgggctgcccgcgcgcgccgtgctgacgccgtggctgtcgcgctacctgtcgagcgagtcgcggctgcagcgccgcgccaggccgcgtgaatgcctggagggcttcgactgcctgcaggcgtgcgggctgcgcgacggcattgcccgcatcggccagttctgcatcgacctgaagctggcgcaggccgtgcgcggcgacgtggagcgcggcctgttcttccgcggccggggtgcgctgcccttcggcgaggcgatccggccggtggcggagctgatgcactatctgttgacgggggaaaagcccgccgggctggcgccagcctgacggcaacagcttcagcaatctgagcgagccaacccgcaaggccggcaagtgcaacgggcgccgcacacccgcagcaggaaagactttgtcagcaatctgagcgcggcggtaatccgccgcgcttcttcatctcccgcatgcatcgcaacgctcccagcagttgccaccccagccacgcattggcgcccgccagcagcacgccgccagcacgggccagcggcgccggcgccagcggcaccgccagcagcaggacgtaggcagccagcagcagccatgcctgccgccgttgccggcccggcacgatgatggcctgcatggccggcacccgcgcgcgcggcggcagcagccggcgcaggtgcagccaggccaggaacggcacgatcttgccgagcatggccgtgaccggcagcacgcccacgccgaccagcgccatggtgccggcccaccatgccagcggcagcccggtggcgggcagcaccacggccgccgcccccagcagcgccgcgcctgccatgctggcgcatgccaccggccagagcagccacagcggatcatggcgccgccgcgcgcgcagcgtgccggccagcccgcatgcgcccaccaccgccacgaacgccagccacacgagcagcacgccatacgccagcgcacggtgatccggccacagcattgccgcggcgctgaacagcgccagcggcaaccagtgcgccatgggcagccagcgcccgatcgccgccggcaggcgtggcacctgccagaacatcggcagcacggtggtggccacgccggtcaccagcgccgccagccagccgcccagcacccacgccatatgcaggccgagccagcgcgccaccggcacgcgccaccagccgccgaaggcgccggccagcaccatgccgcacagcaccgcgaccatcagcggcgcgccgatgccggcaagggtgcgcgtggtggcatccactgcggccacgcgccggcccgcagccagcaggatggccccggccagcaacgggatcacggccacggccgcagccgcctgcatcgccacaggctcgccgccgagcaggccaatgcccagggcagtggccacgcccgcgccggccgcggccatgaacggcgcaagcagccccgcacccggcacggccacgccggccaccaccggcatcatctggaacagcgcgcccaccatgaccggcagcagcatgcccagcgccagcacatgcaccgccaccagcgccagtggcgcaaagcggtccggcaagccgccgggcggaccggcggcaagcaagactcccgccgcagcaccaagccacggcgccggcatcaggcagccgaacaccacggccaggcgcggggcgcgttcatagtcgaaactggctgccttcacgccttgcttctccccatcaatgttgggacccgatgctaggctagggcaggtcgtggggatttgaccgcagataagtccgacgatgtatccccgcgccatgcggtggagcgatatgtcacgacgtgacaggcctggtgtgtgggcggtattccccgcaaatgacaagccgatgcgccgccggccgcacatgccagacgccgaagccgggttttcttgatctggcgcaggaagccccgcgtgctgcgcagggaaaattgccctcgatgccagcgcgcagccatgcacgcgccggccgccgggccaccacccggcttcccccgactggtagcccccgataccgccatgttccgaaccgatcctccagccgccagcgccgcggcggacttccgcgctgccggcctgtcggcgctgcgcgaccgcctctccacccgcatcatctcgctctcgctggccgtgctgctggtggtgctgggcatgattgccggcacgctgtggctgtcatggaagctggagggcgcgggtgccgccatcaatgacgccggcagcctgcgcatgcgcgccaaccgcgtggcgatcgaactgacgctggcgcaggcgcgccaggacaatgcactggccgagcaggtgcaggcgctggacgccacgctggccctgctcaggaaaggcgacgcggcgcgcccgctgttcctgccggacgaacccgccatccatgcccagatgacccgtgtcacgcagggctggcaacaacgtctgcgcccgctggcggtagccggaacgggcgagcacgcagcgccggcaagctatatcgccgcactgcccggcttcgtcgcgcaggccgatcgcctggttggcatgatcgagcatgacagcgcgcgcaagaccgactggctgcgcttgtcgcagatcgcgctggcggcaatggcctgcgtcggcaccgtggccgtgatctacctgctctacctgtggatcatcctgccggtgctgcggctgcaggacggcctgcggcgcatggccgcgcgcgagttctcgctgcgcctgccggtggaaagccgcgacgagttcggcaccctcagcgaaggcttcaaccgcatggccggcgaactgcaggggctgtaccacgacctggagacgcgcgtggcacagaagaccgccgagctggaacgccagaaccgcgacctggagacgctctacgacatggccgccttcctgaaccaggccgccgatgccgaggccatggcgcgcggcttcctggaacgcgtgatgcgccagttcgatgccgatggcggcagcgtgcgcgtgctggacagccgccatggcaggatgcacctgctggcagccgccggcctgccggccgcgctggcagaatccgaatcctgcgcggcggccaacgcctgccattgcggcgacgccacgcgcgaggccgtggtcgccatcgtcgacctgcgcgcggcgcagcgccagggcgccgccggggatgccacgccctgcagccgcaacggcttccagtcgctggcggccttccgcatcgaaagccagcgcggcgccaccggcgtgttcgcgctgcacttccgcacgccgcgcgcgctgcccccgtcagaccgccagatgctggaaacactgggccagcaccttggcaccgcgctggaacacctgcgcctgtccgcgaccgcgcgccagctggcggtggtggaagagcgcaacctggtggcgcagggcctgcacgacagcattgcccagggcctgaactacctgaacctgcaggtgcagctgctggacgccgcggtcgaacgcgacgacctggccgagacccgtgagatcgtgccgatgctgcgccacggcgtggaagagagctaccaggacgtgcgcgaactgctgaacaacttccgctcgcggctcggcaccggcgagctgcgaccggcggtggaagagaccgtgggccgctttcggcgccagtgccgcaccgaggccacgctcgccattgacgagagcggcggcgcctggccgctggcgccggagcagcagctgcaggtgctgttcatcctgcaggaggcgctctccaatgtgcgcaagcacgccatggcggcgcacgtggcggtggcgctcagccacggccgcgatttccggctggtggtgcaggacgacggcgagggcttcgatccggaggaaatcgccacgcgcgccgaagcgcatatcggcctgaacatcatgcgcgagcgcgcggcgcggctgggggcgcagctgcacgtgcaggcccgccccggccacggcgtgcgcatcgaactggtgctgcccgccggccgctcttccggcgcccgcgagttcgccgacacccgccccgcccccacgaccaccgagacccagccatgaccatccgcatcctgctgatcgacgaccacaccctgttccgctccggcatccgtgcgctgctgcagcggcaggccgacttcgagatcgtcgacgaagccgccgacggcgtggaaggcatcaagcgcgccaagcagcaccgtcccgacgtgatcctgctggacctgaacatgcccggcctgtccggcctggaggccctgcagctgctggtggaagacctgccgcggaccgccgtgatcgtgctgaccgtgtccgaggaagccgaggaactggctgccgcgctgcgcggcggcgcgcgcggctacctgatcaagaatatcgagaccgaggcgctgatcgccggcatccgccgtgccgcggccggcgagccggtcatctccgacagcatgaccgccaagctggtggcccagttccgcgctcccgcaccggtggccgcggcgcgccaggacgaagcgccgcggctgaccgcgcgcgagcgcgagatcgtgcagggcctggcgcgcggcgaaagcaacaaggagatcgcgcgcgacctgggtgtggcggaaagcacggtgaagatccacgtgcagaacatcctgaagaagctgaacctggccagccgcgtgcaggtggccgtctatgccgtcgaacacgggctgaacgcagcgttctgaacgcggcgcagtggccgccacgacagccctgcatgttgcgcgtccggcaccccaacgtcgtccgattcctacagcgatttcagccctagtccggggggacgccggcgccccctgatctaggctgaactgtaagcagttggctctccgaggccacccggtccggaagcccggcttgccagatccacaacaaggagcacgccatgggaatcggcaccattctcctgatcatccttatcctgctgctgatcggcgcgttgccggcctggccctacagttccggctggggctactggcctagcggcggcctgggcctgatcgtcctgatcgtggtgctgctcgtggtgcttggccggatctagcgttcccggccagcctgcgggcaacgcacgccggctggcgcacgcagcggcgccagcgcggggctacccttgtcgctgccgcgccggcgccctataacgaagcgcgggcgtgtgccaccgcatcgcccggttccttcccccatttgcaaggagacccagatgccagccaaatccaaggcgcaacagcaggccgcgggagcggcgctctccgcaaagcgcggcgaaaagaaggccggatcgctcaagggaccttcccgctcgatgtataaatcgatgagcgagaaggaactcgacaagatggcttcgaccaagaccaagggcatgccgaagcacaagtcagacagttgatcggcaagcttgctcactctcccgcccgtgggcgagcgagcaagcccaagcgggctgccagggccagccaccacctgctatctggcaccgcccttctttcccccgaccctccccctcgccggcccgccgcaatagccgggcaaacgtcttgcccgggtgctgcgcgccagccggatcgactccgccagcgccagcccgaatcccgcaacgctgcccaggtcctgttccacccgctcgcgcaggaaggcggcccaggagaaatcgccggcagcgctgccaggcttgcggtaagccccggcctcgcgcgcaaaggccgccaggctgcgatagggatcgtcgcgcatgccccgcacagtgggcggcagcgccttcgggcccagcagcttgccgtgctcgtcgtagggatggacatggccgagacggcgcatccgtttccagaacgccgacgggctcaggcggctgaagtcatgcagcacgcgcacgggtgcctgctcgtagccgagatccagccacgcccgcgcccagtgatggtgatcgatgatatagaggctgccgcccggcccggccacggtcttgacgcgatggcggcgcatgaagcgccgcagcgccgcgtggtcgtccgggttcgcgtggcgctgcgtgacatccatcttgtagctgacgtgggcataaccgagcgtcagctgggtcgggcgcaggcgagccagttcggcaacggcgttgcctcgcgcgctgcgcggcgtgcctggttcagcgctgtcggctgcggcgacgcggcgctcagtcgttctcggcacgcttctggtcgacgaagtgctcaagctcgctgcccgggtcttcgttgccggtgctctcttcggcaaccgcctcgcgtgcgagcgggcgtggccagtactcaccctcgccgccgcgtatgggctcgccgtggcgggcgggattgaaatccgtccactggccgcattcccagttgccttgcgcgcattccagtgcgctcgccccggcttcacgcagcacgtccacggcaacggaatcgaggccgttgttgacgcatgccgccagcatgacgcggtccaccgcgccgctttccggcgcactgtccggccccaccgacatgatggatacgtcccacacggagaagccgcgcgagaacagggtacgtgccacgtcttcggcgctggcaatcgaatcgaaacgtccggctacgatcgatgacatgatgactgactcccatgatggtggcgatggtcatgactgctgtcatccacattgcaagagccacgcctgcgcctgctgtgcggcacgccgcgcgcacggcctgcatggcgcgcacgccggcgtgcaatatttgcaaaggcggccccggaactacatgccccgccctggcgcctcagccgttgacgacctcgccgccgttgatgtgcaggatctgcccggtgatatagctggccgcgtcggacgccaggaatacaaagcccgccgccacctcgaacggttgtcccgggcggcccatcggcgtcttcttgccaaactcggccacttcctccgcggtgaaggtcgacgggatcagcggtgtccagatcgggcccggcgcgacgccgttgacacggatgccgcgctcgaccacctgcagcgccagggaacgcgtgaacgatacgatcgcacccttggtggcggaataatccagcaggtgcttgctgccgcgatacgcggtcaccgaagtggtgttcagtattgacgcgcccgacttcaggtgcggcagcaccgcgcgcgtcaggtggaacatcgcaaacacattggtgcggaaggtggcctccacctggctggcgtcgacctcttccagcgaggccttggagtgttgctcggcggcgttgttgaccaggatgtcgagcttgccgtactgctgcaacgcctgtcgcgccacggcctcggcatgcgcgcggtcggcgaggtcgccggcgattgccaggcatttgcggcccgccccctccaccagctcgacggtctcgcgcgcatcggcatgctcatcgagataggcgatggcgacatcggcgccttcacgcgcaaaggccaccgcaatggcccggccgatgccgctgtcgccgccggtaatcagcgccgcgcgcccgcgcaggcggccgctgccgacatagtcgtcagcgccgctgtccggctgcggccgcatggcggactccaggccaggttgtcgcgactggtgctggggcgggatgctggtcggtgtggacatggctggctcctgtctgcgcggccgcatcgcggcccttgcaggtgccgcgcaaattccatgccgcaaacggcgagcccgggccacgccgcggcccgcggccgtggctgacacgccgcccgtaacccttacatcgcccggcaatccttacagcgatccgggacggccagcccgcctggcccccgcgcgcgcgtcggggcacggatattgcggccattgcaggcatgaacatcaccggcccggcgcgcctgcggcggttgccgcacgggcccgccgcacctggcagtgcggcggaggacgcccgggccccacagccaggaggcaaccatgttcaacttccgcaacgagcgcagccgcagcggcccccgcagcggcagcgaaacgcagcgccgcgagcgcggcccggcgcaacggacgcgcgaccagggccggggcagcggctcggaggactggggacaggaatggggcgaggactggcgcggcgacagcagcggccaatccgcgcctccgggccgcgaacgcgagtccgatctccatggcggcccgtggtaccagcagggcacgcctgccggccagcgccgcggcagttggggcgaaccgggctatggcgcggccgacacgggcggcaccggccatccgtacagcagcggctatggtggctaccggccggccccgcaggacagcggctaccgcagcgaagaacgcgaatcgggctatggctaccgcgatgaagaccgcttcggcccgcgcggacgccgcagcgaactcagcgatgaggatgacccgcgccagcctggccgcggctggcacggtggtgaagaagaatggggtgaacgcggcggccgcgccatgcactggcgcgaaggcatggaacgcgaccgcgcgcagcgcgccgggcagccgagctatggcggcggctattttggcgatgccggcagcggtggccagtcgtacagcggcggccagcgtgtgtacccggatgatccgggctaccggcgccacgcgtcctatacggcgcaagcgggagcgccaggcggccagcgcgccgggcgccgtccggtcggccccaagggctaccgccgcgccgatgagcgcgtacgcgaggatgtgtgcgaacgcctggcgatgaacccctatgtcgatgtccacgatgtcagcgtggaagtggccaacggcgtggtgacgctggacggcaccgtgcgcgagcgccgcgagaagtacgtgatcgaggacattgccgatgccgtgttcggcgtcaccgaggtgaataatcacctgcgcgtgcagcgccagccgggcgccgcgtgggcggcgggctccgaggtcggcggcgacgatgcggccggcaccgatacttcggggatctcgcctgagcgcacgctgaacaagagttgatgcgcccatgcgccgccagcctcgcaagctgtgcccggacagcaagctgatggtgccgctggatgccctgcgtcccacccagatcacggtaggcggctaccacgtcgcgcagaaggtccatgtcacccggcgcgtgccaccggaggaccgcgccgcgttcctggaccggcaccgcgtacacctggtgatcggtccggaacaggccctgtacgtggtcgatcaccatcactgggtgcgcgcctggcacgatctggggctcacccatgtgccgggcgtggtgcgcgccgacctgagcgacatggacgtgccggcgttctggcgccacatggtggccgagcacatggtccacccttacgacgaacacgggcgccgccgtccgctgacggaactgcctgccggcatccacgacatgcgcgacgacccgtatcgcagcctcgaggccttcgtgcagctggccggcggctatcgcaaggtcaagaccgcctatatggatttccgctgggccgactatttccgccgccacgtggcgggcccgttcgacaccccgcatcactttgccatcgcgctggcgcaggcgttccggctggcccacgccgcgggcgcgcgcggcctgccgggctacatcggcccattggggtgctgagccggttcagctgtcctggcctgctgccatcgacatggcgcaagccgctattgggcgccggataccaccgccggcacgcttgcggactcggcctgcggcatgcccggctcgccggtggccgcctgcggtgcgggccgctccgcgggccgctcggcgcgctcggcgctgaccgggccggcgcgcgcgacggtgatcatctcgcgcagccagttgaccagcaggctgctgtagccgcgctggctttcctcttccgtcaggccgtggtcggcacccttgatcacgcggtaggtcatggagctggcgtgcacgcaggcatccacgtagctcatcaccgcggcgtgcggcaccacctggtcgtgctcggattcgatcaccagcacgtcgccggcaaattccgcgcaagcgcgcagggcgcggttgctctcgggcggcaccacgctgcgccggtaggccaccaggtcctgttcgcgatgcagctggcgcttgggcagttcccagcccgagtccatgtacagcgccggcgcgcggaacgccatccagcgcacctggcgcagcgtgctcagcagcgcagccaggtagccgccgtagctgctgcccaccaccgcgatggcgttgcggtccacttcgggctggcgcaccagcacatcgtaggcggccaccacgtcggccaggttgcgcatgcggctgacggtctcgtattgcgcctgggtgccggcgtgcccggtcaggtcgaaggtcaggcagacgcagcccaggcctgccaccttgcgcgcgcgggccaggtattgctgctggctgccgccccagccgtggacaaacagcacgcccggcagcctggtttgcgggctgatcagggtgccggcaatggtgccgccttcgctttctatctgcagcaggtcttcatgcgttgccatcggaatcaggctccagtcgtgcgtatttggtcaacggaccagcgtgccggtcttctccctggaagtagatctcggcgtcgtccggcacgcgcacgcccttgccatagacctcgcgcgtggcagccaccacgcgggcgcggcgcggatcctcgcgcagcgcagccagcgccgccagttcggcgccggtcgcgccgcccacccgccaggactgttccagcacgcccccaagcacctgcccgtggccggcgctgcccgcgggcgggccgaaggcgacgtcgtagttgcagcgcgacagcaccatgttcccggcatcgccatagcacgcgagcgcggcttcgtggtacaccatcgcggcccgcaccgcggccagcgtgcgcgcgtcgaacgggtgccgcagcagcgcctcgaggccgccgcgcaccatcgtcagcgtcgagccaccatagaccttctgcccgtggttgttggcagtgagcccttgcgtgccgcaatagctggcccgcaggcccgccagttccacctgccccacgctgtaggtctgcggcgcgtccaggtcgcgctccgccaccaggccatgggcttccaccacgtcgggcgccatcgcggcaagcgcctcgtccagcgagcgttcgtcgtggaccacgcgctggcccagcccgccgacgccatacggttctttcagccgtaccggccccagcgccagcaggcgcattgccgcaatccgcgcgtcgccgagcgtgaaggcggtgaagcccggcagggtagcgcccaccacgcgctgcacaaagtcctcggaccagccctgcggtgctgccgcgccgggtgccacgaggccgtgcgtgatcgccttggtggccacgaaggcgtaaggcaccaccccgccaaacaggtcgcccgcgccccgcacgccgaggtcctgggccagcttgcgccccaccagcgtctgcgcgggcaccaggtacggcacaggcagccccgcatcaggcgcggcgtaggcgcctgcaaaggtgagacccgcgatgtcggcgaccttgcgggcaatattggcaagggtcgtgccatggtggctgtcggccttgcccagggtctcgcaaccgtagaccatcaccgcgcggctgcgcgccggcaggttgcccggggcggcgcgcttttgattcgttgccttgctcggttcggacacgggcggctccttgctggtggctgtcgctcgatggaatggaaggggccgcatgggctaagagctgggtgccacggtgggtgagcggctcccggcatcgctgccgtccagccggcgcccgcgcgctgcgcgcgcctgccgcttggcggcgtggttctcgcgcgcctcgtccagcgaatggctcgacttgataccgtcttccttgtcagccagctcggccaggtggcgatagaaggtcaccagctggcgcagctcttcctcgtccaggtcctcgatcgacaccagcatattgctggcttcgcggtgcgaggcgagcagttcattgagcttcaggtggaccgcgaccgcgtccttgttctggctctgctgaatcaggaacaccatcaggaaggtgacgatggtggtgccggtattgatgaccagttgccaggtctcggaataggaaaacaatgggccggtgatggcccacgcggccaccacaccgacggccagcacgaatgcgatcggcgatccggcctggcgcgtggccgcgccggcgaagcggtcaaaggcatgcagcacgccggaatgcttgccggacccgggtcgatggtcaatggctggcgggattgggctggaattgttcattgttggcgctcccacagcgtgtggctgtttgtgactggcgtcatttggttggttttttggcacttggcaagcgctgctgtttcgccggcgtagccggcgagttactttttgtccgagcgacagaaaataaccaaagaacgcgtcgcctatgcggctggcaatcagttccacggtgttggtggtacgcacggtgctgcttgccgattgggcgtggttgcccgttcgaccctgctacgccatgtgagtcagtgacagtgcctgcgttaacccactattgaacgatccccatgcagggcataggccgcctgctgccagccatatcgcggggacgcctacggctgctacgcaggcccaaaatgcgttgacggtcattgggcgcttgcgcgaagcgcagccgaaggcgttgatgcgatgtcgcttgagagcgcgggccaccgcccgactccggcgaaacagcggcgcttgccaagaatgacgagcgaccgcatggcgccaacccaagagccaacgcccactcctcatcacctcctcttatcatcccaagggtcataccgatccgcctcccaataaggcgaaatcccgtaatactggtgaatgctggtcgcccactgcgaatccgccatgctgggccagtggtccttgtcaaaccccggcgcggccttgagccgatccctttcaacaccaagcacaaaacacttgcgccgcgtatcgagcgtgagcgccgaccacggcaaggcgaagagtttttcaccaatgccaaggaagccgcccatggccagcaccgcgtaggccacgcgcccacccagcacgtcgatcatgatgtggtcgatggtgccgatatcgtcgccggcggggtcaaccaccttgttgccctcgagcgtgtcggctgccatcacgaatgggccagggcccggggaatcgcggtcgatgccgccgacgatggatgcgccgtgcggcggccgttcttcagggggctcaggttggactcgggtcatggctatctccgtttggcgggccgcggcgcggggccctgggtagaatcccgccgcggcacctggactcagggttgcggaaatgcgcttcagcgcttgctggccgaccccttgcgctggccggccggcttggcgcccacgggctgctcttcactgccccgtttgagcttccagtcgacatcgtcgcgcgcggtctgcgtcttcttctcggcgtgcatggctgcgctcggcgagatcgggtcgctggccgggaacgtcatctccagcgagtcgtccacggcggcctggtaggtcttggcttccttgccccgttgcttgtcgcctgcggcggccttgctgcctgcgtgggccttgcccgcggatggcccgctcatgcgggcagccagggacttgtcggatttcgcgccggacggcttgtgagcaacctgcgcggccttgtcggatttgcggctggctttgggcatggttgtaccctccttggttgggtcattcatccatgcaaggcgcgggccagaaacgggaaaggacaggagagtggcgggggagcggtgcgggcgctgccgtgacgccgcaggtatggcaagtgcaaccagggccggccggcaagcgctacgcgtagcgcacgcgacaggccggtaaaaactacatgaattcgcggcgccgcttcaggcgctcatgtggcgcgggaacctgacggcgatgcaaaccctgatccggtcgttatcgcagccatcgctttccgcgctcagcgccgccccgtgcatttcgaccatgcggcgcgtcagcagcagcgcgctgctctgccgggccggggtcgcgccgtccggcgccgcccggcgcccgaagaaatcggtcagcgcggtcagccggctggcgctgcgctgctggtccagcggcgggctctcggtaatgcgcagcttcacgtgatccggctcgctcaacacctgcacgccgaccgagccgccggccggcgcgcgccagatgcaatgcaccagcaggtgccgcagcagcggggccagccgctcggcgtcgccatcgatcagataggctgcttccgacgaatccgccgcaccgtcagtggcgaccggcgacagcagcacgccacgggcttcggcggtgggacgccggtcggcaatggcctgggccgtgagcgccagcaggtccaggcgctgccagcgcggtgcgctctcgtcggccagcagccgcacggcctcttccatctcctcgatcagcgccagctgctgctgcatgccgaagcgaatcccgtccagcgcgcgctgcgcgggcgccggcatggtatcgaaggcacggtccagcacgtaggcccagctctggatggcgttcagcgacgaacgcaggtcatgcgccgattgctcgatcagcgcgctcacctcttgcacgctgcgcacggcgccggccggcgaggaaagcggagcgtccggcatcgcggattgcggggggtgctgcgtcatgtgcggctcggcattggcacgtccccggccggattggccgggttgtatgcgttggaggaagcaagaaacgtgctgcacagggcgctgcggctcactggcacgggcccgatccccgctaacgcaggcgctgcctcacgccatcagccggtagccgacgaaccggtgtcgttgcgcgaggcgcgcagccactctggcaattcgccgcgggcggcataatcttccagccggttgtacaaagtcttcaggctgatgccgaggatctcggccgcgtgcttcttcacccccgcgcattgctccagcgtggcgaagatcagctgccggtcggcatcggcaagggacatgcccaccggcaccgacaccaccgccgcgcccggcgcctgcgtggccgcgacctgcagcggcacctgcacttcggtgatgaggtcgtcgtcggacatgatgaaggcgcgctgcacgaagttgcgcagctcgcgcacattgccgggccaggcgtgcaggcgcaggctgtccagcacattgggcgcgaagcggcgctgggtgccctgctcggcattgagctggtccagcatcaggttggcgatctggatcacgtcgtcgccgcgcgcgcgcagcggcggcagttctaccgggaacacgttcagcctgtggaacaggtccgcgcgcagcttgccgtcggccaccgcatcttcagggttgcggttggtggcggccagcacgcgcacatcggcatggcattcgcggttggtgcccacgcgcatgaaggtgccggtctccagcacgcgcagcagcttgacctgcagctcggcgggcatctcggtgatctcgtccaggaacagagtgccgccgtcggcgcgctcgaaatagcccttgtgctggcggtccgcgccggtaaagctgccgcgctcgtggccgaacatctcgctttcaatcagcgtgggcgagatcgcgccgcagttgaccgccaggaacggctgccgccgccgcgacgagagctcgtgcacggtctgcgcggccagttccttgccggtgccgctttcgccgatcagcagtaccgtggcttcagtcggggccacgcgggcaagctggtcgtagaccacctgcatcacttcggaactgcccatcagccggccgaaacggccgtagcggcgcaactcgccgcgcagcgaatggatctcggcgcgcaactcgccggtggtggccaggcgcctgagcacggtctgcagccgcgccacgttgatgggcttgaccaggtaatcggtggcaccggcgcgcagcgcttcgaccgcgctttccacactggcataaccggtcgtgaggatcacttcgacgcccgaggcgccaacctcgtcgaacagctccatgccgttgccgtccggcaggcgcaggtccgccacaatcgcctccggcatgcgccagccgatctgcagccgtgcctcgcgcagggtgcccgccgtggcggagctgaagccttccatggccacgatctcggctagcgcggcacatgcgttttcgtcgtcatcgacaatcaggatgtggggcatacgatccgtcagtgagacctattggaaacttgggcgaaatccgctggcgcctccgttcgcgggccacggcggtcacgctgccgggctcgggcacgcccgccgccacgctccatgcaaggcgtggcgcgacaggcacaggggcggcacgggtctcgactgcgacattgtcagtcggttgcacaagtccactgcgtaatgccagtctaagcgcgggcaggcacggtcgttgccggtgtccgtctgacacagctgtcggatgtttccgcgcgggctcagacacctatggcaagcccctgcgccaaaggctagcataggaacttctcacgacaagcccgcccccgaccgaggccttcattgtgcccgtgaccgccagcacatcgcggcgcagcaacgccgctctctctgggcagcccgccagccacgccgccagcacatccgagccggcgcgcgagcccgcgccgcgccgtgccataccctcgcaggtgtcgctgctgtgggaaagcgcgtcgcccgccatgcaacgcctgctggcccagatcgagcgcgtggcgcccaccgatgtcaccatgcttgcggtaggcgaaagcggctccggcaaggaagtggtggcgcgcgcggtacatgagcgcagcgcgcgccgcaacggccccttcattgcggtcaactgcggggcgatccaacccacactgatcgagtcggaactgttcggccacgagaaaggcggctttaccggcgcgatcgagcagaaggcaggctacttcgagcaggcccatgggggcacgctgtttctcgacgaagtcactgaaatgccgctcgagatgcagatcaagttgttgcgggtgctggaaggccgcaccttccaccgcgtcggcggcgacacgcccatcgccaccgacgtgcgcatcctggcagccaccaaccgcgacccggtcgaggcagcgcgtgccggccagttgcgtgaagacctgctgtaccggctggccgtgttcccactgcatatcccgccgctgcgcgagcggcccgacgatatcgtgccgctggcacgccacttcctggccgagtacaacgccatggagcgcaccgacaaggccttctcggccgcctcgctggagcggctggtgcgctatgactggccgggcaatgtgcgcgagctgaagaacgccgtctaccgcgcctttatcctggccgacaaggtcgtggagatcggcaaccccaacctggccacgcagccgccgcggcccaccacggtagacggcgtggtcagcgtgcgcgtcggcaccacgctggccgacacccagcgcgaaatcatcatggccacgctggcgcgctttgacggcgacaagcgccaggccgcgcgcgcgctcggcatcagcctgaagacgctgtacaaccggctggacgcctaccgctccttgtaaggcagcggcgcggccagcgcgcgcgacagggcctcgatcgccagcggcttggtcaggtaggcatggaagccggccagttcgctgcgccgctggtcttcggcagtgcagcgcccagtcagcgccaggaactgcaccgcgcgcggggcgcacgcctggcgcaatgccggcaggacttcaaagcccgacatgtcgggcatttccaggtcgagcagcacgcaatccgggcggaattcggcaaccaggtccagtgcctgctggccgccatgggcggcgcgcgcctcatggccgagcaggcccagcagctcggccatgctgtcagccgaatcggcattgtcgtccaccaccagcacgcggcgccgcggcaccggccctggcggcggcgtgccggcctcgcggcggcgggcgctggcgcgcggcaggatcacggtgaaggtgctgcccttgcccgcgccaccgctgtcggcctggatcgcgccgccgtgcgcttccaccacggccttggccagcgccagcccgatgcccaggccgccgcggctgccggcgccggcctcctgcgcgaacaggtcgaagatgcggtccagcgccgccggcgcgagaccccggccggtatccgacacggcggtgatgacgcgcgctgactccacgctcacatgcacgctgacgataccgccgcgcggggtgtacttgaccgcattgctgagcaggttcagcagcacctgccccagccgcgcggcgtcggcgcgcacatagggcgagcttgccggcagcgccaacacgagccgctggccggcggcttccagcaccgggcggattgcctcgatgctggtggttaccacgtcgttgtacgaggtgggcgtcagctccatcttcagcttgccggcggtcacgcggcctacgtcgagcaggtcgttcaccagccgctccagctggtgcagctggcggtcgatgatcccggcgcagcggcgcacgcgcgtgtcggcatccggggtcagctcgatcacttcgactgcgttgcgcaccgccgccaggggattgcgtagttcatgcgccaggatggccaggaacgattgcagccggcggctgccggcctccagcatttccagccgcagcgcatcgctcaggtcgcgcacggtccacagcaggctggtcgggcagccggcggcgtcgcgcaccagcaccatgcgcgtatggcaacgcaccaccgagccgtccttgcgtgccacgcgctcttcgccggcccactggccgcacgcgcgcgcggcttccagcgccgcgcggtcgcgccccgcggcggcatcctggcgggaatagagcagtgccagcggctggccgacggcttcggcctcgacgtagccggccagcgcctgcgcgccgacgttccagctgcggatggtgccgtccaggtcaagttcgcacaccgcggtgccgggcaggttttcagccagcagccgcatccgggtatcggcgagccgggcatgctcggatgcagcctgctgcacggtaatgtcgcggcacgacacgataaagccggcggcctggcctgccgcggactccacggacgaggcatcgccatgcctggccgctacgtccggcccgtcggcagcgccaatggcccgcatgaggcaggacgcctgcaacaggctgccgtcgcgccgcacgcgccagccctggtcgcgcgcgctgcctccgagtgcggccgcctgcagccattgctgcggcaggccggcagcgacatcgtcaggacgatgcaggcaggaaaagtgacggccggtgatttcctcggcgctgtagccgaacacgcgccgcgcggcatccggccacatcgcaatacacccgtgcgcatcagtctcgaacacggcgcagtcttccaccgcgtcgagcaggcgccggtactgtgccgccagcaggaggccggcatcgtccgccagggtgcagtccggctcgccgacgagtgacgtacggatgccttttgccgcatgcggctcggacatgagcataccttctgtgtgatggggaagacagcaggccccgtgcgcgggcggcctggcgccgccgcccggcggaggcccgaatgcccgcaactgcgggcattcgagtcaatgataggcgttcgcggcccacgcgccaccaatgtgcgcagcacaggacactagcgcttgtgccgcaactggtacaccgcggcaaccgcggcggaggcgcccaccaccagcgcagtggccagcatcgggtgccgcgcggtggtggtgtaggggcaggagtgcagcgcgttgtggctgccgctgcgttcctgcaggccgctgccgctgccatacagcgcgttgtcctcgagcggacccgcggggtgatgcgtctgttgcgcgcggcccatgaagcggcgcatgaagcggtcgaaggtgtgcggcgcgtggtacgccgcggccgagaacgccttggcggcagcaccgacgaaaagctcgcggcgcgggttcgcggcagcaaacaggatcgcgtcggccgccagcgccgggtcatacagcggcggcggcatgcgcggctcgacatcgaggaaattcttggcgtgcatcgccagcggcgtttccagtccggcaggcttgatcagcgtcacgctgaccggcgcctgctcctgctccagttccagccgcagcgaatcggtaaagcccttgatcgcgtgctgcgaggccgcataggcgctctgcagcggcagcgggccgtccgccgcctcgctgcccatgttgatgatggcgccgccgtgctcgcgcaggtgcgcggccgccgccagcgagccatgcacggtgccccagtagttggtatcgaacagccgccgctggtcttccagcggcacgtcgcaatggcggccgaagatggtcacgccggcgttgttgatccaggtatcgaagccaccgaagcgctcgatcgcagcctgcgccaccttgccaacctcttcatgcttgccgacatcggccaccacggtgatgacttcattgccatggtcgcgcagctcttcggccagctggtgcagcgagccctcgctgcgcgccaccagcaccagccgcgcgccctgctgcgccgccttgcgcgccgtcaccaggcccacgccgctgctggcaccggtcaggacgatgacctgcgagccaatgttcttcagggttggtttcatcgccgcttctcctcggggaggcccggcacggtgccgggcatgccgctggggagtcgcaaggagcgttcctgtccggggcggccctggctggcggcgccacggcaggcgggctgccgcagatttacaacacccggtaagaaccacatggcgcgacgcgcatggggctgccgccgggcgctgtaggacgggcgccgatttcagcggcggcatgtgctgcctaagctggatacatcccacctaaccggcgacagcaatggccaagaccacgcgaccgacagcgccaaaggatcccggcaaacgccgcgccgcggcaaaaggcgccggcaagcccaccggcaagcgcgccagcacggcccgcccggcggcacgcggcgcgccagccgccaaggccgctcccgccgcgctcgacaaataccgtcgcatgcgcgacttcggcgccacgcctgagcccagcggcgccgcgcgcacccgcggcaaggtgcacaagcgcgccggcgagctttccttcgtgatccagaagcacgcggcgcgtcggctgcactatgactttcgcctcgaactcggcggcgcgctgaaaagctgggccgtgcccaaggggccgagcctggacccggccgacaagcgcatggccatccatgtcgaggaccatccgctggactatgccggcttcgagggcgtaatccccgccggccactatggcgccggcacggtcatcgtctgggaccgcggcacctggttgccggtaggcgatgccgaggccggctaccgcgccggcaagctgaagttcgagctgcgcggtgaaaagctgcacggtcactggaccctggtgcgcatgcacggcagccggcagaaggagcaggacgcctggctgctgatcaaggagcgcgacgagaccgccgtgccggcatcggagttcgatgtggtcgaggccttgccggacagcgtgctgggcggcacgcagcgcaaacccgcggcaaagcgcgcgaagtccgcgcagccgcctgacgaagccgcaccagatgcacacggcacggcgaaatccctgaagccgccgcgcggcgcgccgcgcgcggccttgccgctggcgctggcgccgcagctggccacgctggtggagcagcctccgtccgacgcgcaggcgtggcgctacgagatcaagttcgacggctaccggctgctggcccgcatcgacggcaaggatgtgcgcctgttcacgcgccagggcaacgactggaccagcaagctgcgtgcgctggcgcgcgacgtcggcaccctgggcctgcccgatggctggctcgatggcgagatcgtggtgctcggcaagcatggcgcgaccgacttccaggcgctgcagaatgccttcgataccgcgcgcgtcgagggcatccagtatttcgtgttcgacctgccctactttgccggccatgacctgcgcaaggtaccgctggtggagcggcgcgccctgctgcgccggatcttcgcgcacaacacctcgccgcgcctgcagttcagcgaggacttcgaggccggccctgccgacatgctcgaggcagcctgccgcatgaagcttgaaggcgtgatcggcaagcgcgccgacgccgcctatgtcagcgcgcgcaccagtacgtggatcaagctgaaatgcaccttgcgccaggagttcgtggtggcgggcttcaccgacccgaagggcagccgcgccggcatcggctcgttgctgcttggcgtgcacgacagcggcgggcggctgcgctacgcgggcaatgtcggcaccggcttcgacgcgcgcacgctgggcgcgctgcgcacgcagctggacgcgttgcgcgccgattccgcgccctttgagaacgtgcctgcaggcgtaaaggggcactgggtgcggccaaagctggtggccgaggtctcgttcggcagctggacccgcgaaggccgcgtgcgccatgccgtgttccacggcctgcgcaccgacaagcccgcgcgcgcggtgtcggtggagcggccggcaacgccggcggccaacggcaagcccgcggcaaccacggcaaagcatgccggcacacggccgaaggcggcggcaaagcgcaccaccgccgccggcggcaaggtcgcgatcagccatgccgagcgcgtcatcgacacagcatccggcctgaccaagggcgacctggtgcgctactacgaacgcgccgcgccgctgatcctgccgcacctgcgcgggcgaccgatcgcgatggtgcgcgcgccatcgggcgtgggcggcgagcagttcttccagcggcatagcgacacgctgcgggtggacggcctcaacgtgctcgatccgggcctgtggcctgggcatcccgcgctgctggaaatcgcgtcggccgaagccctggtggccgcggcacagctcaatgtggtggagttccacacctggaacgccggcaagcgcagcatcgagcgccccaaccgcatcgtcttcgacctggacccgggcgaaggcgtgccctggccacaaatgcaggaagccgccgcgctgatgaaggcgctgctcgatgaactcggcctcgccagcttcctgaagaccagtggcggcaaggggctgcacgtggtggtgccgatcacgccgcgtgccgggtgggacgaggtgaaggcgttcgcgcatgacgcggtgcgccatgtcgccgccaccgtgccgcagcgcttcgtggccaagagcggtccaagcaaccgcgttggcaagattttcatcgattacctgcgcaatggcataggcgccaccacggtggcggcattctcggcgcgggcacgcccggggctgggggtatcgatgccggtgtggtgggaggaactcgatagcctgcaaggcgcggcgcagtggaccgtggccaatgccggcccgaggctcgacgccgtggcggccgacgacccatgggcggactacgccgaaacccggcaggcgatcacgcgcgccgcggcgcgactggcacgcgcccgatagccccccgttcccgccggagatccacagcagtcgccaagcggcacatttcttgccgcatcccggtcatggcacacggcccggcacccccgccgcgtgcgccacgttgcactgctgccagtgcagcgacgacatggagacgtgatgatgagccaactcaggatcgccgcgaagattcgagccaccgctgccgcgccacgcaaccgccgcgccttgcgccacctgctggtttcctgcgcgatgctgtccttcgccgccagcccggtgcaggcacgcctgccggcaccgacgcccgagcagcagctggccgccgaagccaagaagtccaaggaagccgaagcggccaaacagcaggccgaggcattaagccgggtccaggaccggatcgctgcgcgctttggcaagggcgccaccggcggcggcactaccgagcccggcaagatcccgcagaaagctgccgaagcggccggctcagccggaccgcacggcggcacctcccccagcgccgaagcgcatggcggcgaggcggcccgccgctgaagcgggccacgcatgccacgccgttgccgcgctgcgtgccgggcgacgcctgcccggcacgcctcttgccactctgccagcgcaacagcctggcaaagccgcaggcgtgctgatgcataaggggaatggcgatggacgacttctgtgcgcatgtaatacctacaaccggcggccgcgccagcgcggcaaagcttgcaagcggggcagcgcggccggcgcggttttacacggcgccgccgcggaccatcccgggccctgagcaaacctccgcgcgggcgcgcaagcgcctgtcagcgtgatgccatgacgccgcatgccgccaacccggccccgctgatcctgaatgtcgatgaccgcgaggggccgcgctacgtcaagagtcgcatcctccatcgcggcgagtattccgtgatcgaggccgccaccggccattcggcgctgtcgctggtgcgacagcatgcgccggtgctggtgctgctggccgcacgcctgcccgatatcagcgggctggaagtctgccggctgctcaaggccgatccacagaccgcgcacacgctggtgctgctgacctcgccagggctggcgcaatcgcgccagcgcgtagaggcgctgaactgcggcgccgacggctacctggtcgagcctgccgagccggaagaggtgttgtcgagcatccaggcgctgctgcggctgcgcggggcagaggacgcctatcaccgcacctcgcgggcactgcatgagcatgaagacatgttccgccaggtggccgaatcgctggccgacgtggtgtggatcctcgacccggccgagccccgcctgctgttcgccagcccctcgctcgccacgttgtgcggccataagcccgagcagctgacgcaagagccgcgccgctgcctggagcgcgtggcgccggccgaccgtgcgcgcgtggaagcggcgttcgccagcatgctgggcgacggcaggctggacatcgagttccgccttgcgcgcccggacggcgagctgcgcgatatccgcgcgcgcgcgttcccggtacgcggcgcggaaggccagccgggcgacgaccgcacgccgccgttgcgcattgccggcacctgccaggacgtgacgctgcaaaaccgtgccggccgcgcgctgcatgacgaggaacggcgcaaggaccagttcctggcgatgctggcgcatgaactgcgcaatccgctggcgccgctgcgcagcgccgcggacctgttgcagcagctctcgccctcgcgcgaggacatgttccgcgcgcgcgacatcatcggccggcagctgcaccacctgacccggctggtggacgagctgctcgacatctcgcgcttcaaccagggccgcatcacgctgcgcgaggacctggtggaactgcgcaccgcgctcaataccgcggtggaagccgtgcgccccacgatggacgcctgcggccatacgctgcgcctgtcgctgcccgagcagcccctgccggtacgtggcgacctggtgcgcctggcgcagatcttcagcaacctgctgcagaacgccgcggcctacacgcccgccggcggccagatcgtcgtcgatgccagtctcgaggacggcgcggcgaacaccgcgcccgatgccgcgtccggcgcccgcgtcaccgtgcgcgtgcgcgacaacggcgccggcctgtccgaggcactgcagcggcagctgttcgatccgctggccgcgcgcgacgacggcacccagcccgaaccgccgcgcagcgcgatccagcaggacggtcccggcatcggcctgacgctggtgcaaaagctggtgcggctacatggcggcaccatccgcgccgacagccccggccccggacagggcagcaccttcaccgtgacgctgccggtagagccgtggcagaagtggcacccaggctccggccgcaccgcgccgcaccgcggcgtgccgcgccggatcatggtggtggacgataaccctgacgcgctcgaggccatgatgatgacgctgcagacacttggccatacggtggtgaccgccgccgacggccccagcgcgctggcgcgcgccaccgatgcccggccggaggtggtgctgctggacctgggcatgcccgccatggacggcttcgagaccgcgcgccgcctgcgcgcgctgcccgagatgcgcggcgccacgctggtggcgctgaccggcttcggccagcccgaggaccgccgccgcgcgctggaagccggcttcgaccagcacctggtcaagccggccgacctggacgcgctgacacggctgctggatgcactcagcgcggaccattcctagcgcgatgccgatgccagccgccgctcccatccacccttgaacaaggaagctccgtgcataccacgcccgatcccgacatcccgccgcgcaagcctgaaaccccgccgccggaacctccgccgggcccgcccgaaccagtggcagacccgcctccgggcgatctgccgccaccgccgccgcaacgtgcccgtgcggctggcaaaggagccctcacgtgtcacgcatcatctggaaaggcgccataacctttggcctggtcaatatcccggtagtattgcggcccgcgtcgcgcagccagacgctggaccttgacctgctggacgtgcgcgacatggcgccggtgggctaccagcgcatcaacaagagcaccggcaagccggtcgacaaggagtatatcgtcaagggctaccagtacgccaaggacgaatacgtgctgctgaacgaggaagacttccgccaggccaatgtcgaggccacgcagacggtggatatcgtcagctttgttgacgcgcagagcatcccgccgtactacttcgacacgccctactacctcgagcccgacaagcgcggcgagcgcggctacgcgctgctgcacgaaaccatgcgccgcaccgggcgtgccgcgctggcgctggtggtgctgcgcgcccgccagcacctggccgcgatgctggtgcacggcgacgcgctggtgctcaacaccatgcgctttgccgacgaggtgctgcccatctccgaactgcgcctgcccaaggcgaccaccggcaaacccaccggcgcgcatgcgcgcgagatcgagatggccaccaagctggtcgaagacatgagcgaagactgggagccggaacagtaccgcgacagctatcgtgacgacctgatggcgcgcatcgaagaaaagatcgactccggcaagacccaccagctgaccccgcctgcggaagaggaagaagcgccgcgccagggcgccaaggtcatcgacatggtggcgctgctgcgccagagcctgggccagcgcggcaaggaagacaaggaggacgccacgcccgcgcgccgcaaggcccctgcgcggcatgccgccgccaggaagcagcccgctgccaagcgggctgcgaccccgcctgccaagcgcgccagcaccgccgccaagaccaagcgtgcaccggccaagcgcgagtcgcacgcgccggccgcgcgcaagagttcaagcactacgcgcaggaagcacgcggcttaggcaggggggccaaattccgattgcgttctccctctcccgcgcgcgggagagggagcaaaccctcagcatcggacaaacccgcttaccgcgatgacaccttcaggttgtcattgaccgacgtcacgccctcgacgctgcggatcgcgtcgagcgccaggtcgtgctgctgctggctcggcaccgtgccgctcacgtcgaccgtgccctgcctggttttcacacggatgccggtggacttgaggtccttggtcgtgagcagcttggtcttgatcctggtggtgatggcaccgtcctcgacggcccgcttggccttgtcggcgctcatgtccggggcggcgccccggtcagggtcggcacggccgggcatgcccggcgcggaattgacgggtgccacaggggtatcgtcggccgcaaccaggatcaggccgctcttgtcgagcgccagcgcgctaccggctaccgccagcgcggcagcaacacaggccatccgcacggtgcgcgcgggaattcgggaaaaacgcatggctgcctcctttttcgggtcaccagcgcatccgttgccggacttgcctggcacgcggaaccactggtaaggcatatttcagcaagctccatacctgccgggcaggccgcaccaggcgtccgcggcggggcccacggcgtgtaaatcgggccacccgttgtaaaagcgcccgccgcgtgatgtgctgcatcccccgttacaggccgttgctggcggcaccccggtccttccatccttggcatggcgattgcgaaacaggggatgcggcagttcgccgcgtcaaggagctagcaatgggacagcagcaacagccgggtcaatcgcagtcgggccagaagccgcaggaacagaagcagcaggaacaatctggccaacgcggcagccagcagcagccgggacaacaacaaggcggcggtcagatgggtaaccaggaccgcaagcaggaccaacagcagcagcaggatcgcggcagctcgcaaccgggccagcaaagtggccaacgcagcggccagcaaagcggccagggcgggcaacagggtgggcaacaaggcggacaacgccagccgtaagtaagccgcgccagccacgataacaggcagctttccgggtatgtgcggccgcaacatgcggtgcggccgcaggggcatacgccggagattgacaggccgggactcccgcaagggggctccggccctttttgcggcaaccgccgcggcatgaccccgcgcacatcgccccgcatcccgtgtatgctggccctgacttccccattcaggcaccggccttgtccagctttaccgaccccgccgccggccgctctgcgcagccacgacgcggcccgctgaaccatctctccaccaggctgcgtgagcgcgccggcgcgcacgtgcgcgcgctgacccgcagcaattccggcgtgaccctcgactacgacaacccgccgggcgatcccggtctgttcgggcccgacgcggtctgctggcgcgtgcatgccgactttccggcaatgctcgcgggcggcgtcagtgcgctgctgctgcagacactgcatccactggcactggccggggtctgggaccactccagctttcgcaccgacatgcaggggcgcctggggcgcaccgcgcagttcatcgccggcaccacctacggcagccgtgccgatgccatggcgctgatcgggcgcgtacggcgcatccatgccggcgtggtcggcgtggccccggacgggcggcactatgccgcctccgacccggcgttgctgacgtgggtgcacgtggccgaggtctcaagcttcctggctggctacctgcgctatgtcggaccactgagcggcaccgagcaggatcgctactacgacgaggttgcgcgcatcgcccagatgctgggcgcggccgacgtgccgcgctcgcgcgccgaagtcacggcctacctggaggccatgcggcctgcgctgctggctagcgaacgcaccagcgaagtggtgcggctggtgcggaagatgccggtggccaacccgctgctgcagccggcggtgcggatcatggccgacgcgggcatcgcattgctgccgccgtgggcacggcaacagctcgatctggacggcccttcgatacggcgcccggcagcactcgcgggcatgcatgtgctggcaccgacgctgcgctgggtgctgggcgccggcctggcagcgcgcgcacggcggcgcgtggcccgcggcaccgccacgacggcaggctaagggccgcgccggctatcggcgttcagctgaacctcttgaacggaaatgagaattggcggcaaaaatcctcccatttcggaggattgcgcggcgcgaaagtggcgttaaatctgcttgggcagtccgaacggccggtcggtttttactaaccgcaccagccacagcgccacagagcgcgattcaaacgacgcaggcaaaaaaagaagcctacgcgcggggtgctcgtaggcttttcaggactgctcgagctgaaaagctcttgccaagaatataaacgcgcttacatgaggtgtaaatcccgtttctatcaggggattcccttatgacgatatgagattatttgcgcacttttgattgttcttagccctgacgctacatcagggcacttttcatatgggctggcaatttcatcgcgagcccggtccaaccggcctgtcgccccgccgccctagccgcggcatgcggcagcgcacaatgctgtacaatatcacggcctcgagagcaacacattttatagagcggcgactctagatccgaattgacacacggttcgtcaacgcttgtagaactttgttactctcagccctgaattattccccttctcttctggcagcgccaaccgccggcacacgcgccgttaccgagagcggatgtttctcgtgccgccctggccgtggcgcaccccaagccattagccgccagaacccttgcgggctcttccggagtcgttgtgaagaagaaggaaacccggcccaagtcacgcagccggagacaattgcaacaccagcaatttgcggcatacaggaccagccaggccccggtgatcgtccacctggccaccggcgcccggctgcagggccttgtcttggcgtcagacgactacgtggtgctgcttggccggcagccggacgacatccggcccacggtggtctacaagcgggcgatctgcctggttacgctggccaatgcgccggacgcgccggtggtggcgccggctccggcgccggagccggacttcctgccgatctacatcccccgcaccagcaagcgccgctaggccaacgcccgccccacgcgccttcctgccctgccgcgcggcgcctcagcccgccctgccggtaccccgcgaaactatcgcggagatcactctaaacctttctcttgcccggtcgataacccaagcaacggaggcactctacgccctgcaaagcaggccgccaacgttacggcactagccggaatgcccaaaactttgcatataggagtcgtaccatggcgcaagtcattaacaccaattcgttgtctctgatgactcagaacaacatgaacacgtcgcaatcgtcgctgaacacggcgatccagcgcctgtcgtcgggcctgcgcatcaacagcgccaaggacgacgccgccggccaggccatcgccaaccgctttacctcgaacatccgcggcctgacgcaagcccagcgcaacgccaacgacggcatctcgctggcacaaacgacggaaggcgcgctgaccgaagtcaacaacaacctgcaacgtattcgtgaactgtcggtccaggcggccacgggttcgaactcctcgtccgacctgaagtcgattcaggatgaaatcaaccagcgcctgtctgaaatcgaccgtacgtcgcaacagaccgacttcaacggcgtcaaggttctggccggcagcaacaagctgtccgtccaggttggcgccaacgacggcgagaccatctccatcgatctgaagcagatcgacaggaccacgctgggcctgagcggcttctcggtggccaagaactcgctggacgtcggcccgaagatcaccacgatcaacgctgccgctggtaccggttcgttcaacgtgagcttcgctgcgggcgacgtcaccaagatcaacgccgcaaccggcaagaccttcgccgcagcggacctcgaactgcacgaagtcaagacggctgccggcgcgaactctggccagttcgtcgtgaaggctggtgacgactactttgctgcttcggttgatcgtgccaccggcgccgtgaagctcaacgaagctgatgtcgcattcgacgacaccgccaatggcatcgccggccccgtcactctgcaagaccaggtagtgcgtgttgccaacgatgctgcaggcgtagccacgggctacgtcaccgtccagggcaagaactacgtcgctgccggcaccctggccgacggcggtgccgccggcaccctcaacgtggccgttggcacgatctccctgagcggcgccacccccacagccgaattcacgggcgttcccaccggcaacgcactgaagaagatcgacgccgcgctgaagcaagtcgacgacctgcgcagctcgctgggtgccgtccagaaccgttttgactccgtcatctcgaacctgggcaccaccgtgaccaacctgtcctcgtcgcgctcgcgcatccaggacgccgactacgcaacggaagtgtcgaacatgacccgcgcgaacatcctgcaacaggctggtacgtcggtcctggcgcaagccaaccagaccacccaaggcgtgctgtcgctgctgcgttaatcgcatcggcgaatggcgcaggaaggctgggccgcaaggcccggcctttttgcccgaggagcatttcgcaggcagcccgactgcctgcaaagcgtttctcctggaactgaaccctgccaacccggacggagtattcgatggcgcctcccccgacagtgaacccctttaccgtgcggatgccagccgaaggcttagccgttgccatgccatctggcggcgccaccaccatggccagccatgctacgcagcgacaggatcgtgccgtggccagcgaccacacagaagccgcacagggattggaaaccagcgccgccatcggcgagctggtcgacgcgctcaagaccaccaccatcggcctgcgcttcgagatcgacgataccacgcaccgcgtcatcaccaaggtgatcgacaaggaaaccggcgacctgatccggcagatgcccaccgaagaggtgctgcgcattgcccgcgccatcgacaagctgcaggggttgttcatcaaccacgcggcctgagccctgaatatcagttgaagacgagacaataatatggcaacgatctcctccatcggcatcggttccaacctgcaactgagcgacctgctggaccagctgcagaaggccgagcaggcaccgcttgacgccatcaatgcgcaggccaagagctaccagaccaagttgtcggcctacagtcaggtgcagagcgtgctggacgcctaccagggcgcggcgaagaagctgtccgatgctgccaccttcggcgcagtaaaggccagcatcggcaccacggacgtgatgaacgtcaccaccgctgccaacgccgtgcctggcagctacagcattactgtcaacacgctggccaccgcgcagtcgctggtgagcagcaacgttgccgaccagaaggccgcgatcggtggcggcgagctcgtgttcgacttcggcgaagcgctggccaccggtggcgccgccactagcaccaagaaggtcaccatccccgcggattcttcgctcgaaggaatgcgcgatgccatcaacaaggccagcatcggcgtgacggccagcatcgtcaatgacggcagcgccagcccttaccgcctggtattgacgtcggacaagaccggaacgcaagccaccatgcgggtgtcgtcgaccgatgcggcactgaacaacgtggttgcgttcgacccggccgcggcgcccgccgccaacaagatggaacagaaggtgccgcctgccaatgcgacgctgacgatcaacggcatcgacgtggtcagccagagcaattcagtggtggacgcagcgcagggcgtgaccatgaaccttgtcaagccaggcacgacatcgctggtggtgacccgcgacaacgtcgcaatcaaggccgccgtccaggcttttgtcaccgcctacaacaacattcagagttccgccaagtcgctgacggcattcgatacgaaggccggtacgtccgcggcattgaccggcgacggcacgctgcgctcgatccagtccagcctgcgttcaatgctgggcggtgccatggatgacggcaacggcggcacgatcacgctgatcgacgtcggcatctcgttcgacaaagacggcacgatgaagctggacgacaccaagctgaccaaggcgataaacgaagacctgggtggcgtcacgtccctgttttccagcaccaccggcgacggaggcatcggcaagcgcgccagcacctatatcgagggcctgagcaagaccgatggcgcgctgaaggtggctcaggatggcatcaccaagacgctgaaggacctggaagacgactatgaccgcgtccaggaccgcgttactgccacggtggctcgatacaaggcccagttcacgcaactggacctggtggtagcgcagatgaaccgtaccagcagctacctgacgcaacagttcaatgcgctgaacaacagcaccaagaagtaaccgtcccgccgcacaccacagcctgaaggaacccaaccatgttcgcccgcgcatccgccaacgcctacgcccaggtcggcgtccagaccggcgccatgagcgccagcccgcacaagctgatcgccatgctgtacgacggcgcgcgcgcagccattgcgcgggcgaagttccacctggagggcggcaacgtcatcgaacgcggcaacgccatctccaaagccatcgacatcatcgataacggcctgcgcgccgtgcttgaccatgaggttggcggcgagatctccgccaacctcgaatccctgtacgaatatatggtgcgccggctgatgctggccaacctgcgcagcgacgcggccctgctggccgaagtcgacacgctgctcgaaagcctggcttcggcctgggcgcagatcgacgacacggccgcggatcggcaacccgccttacaggacaactgacatggcttcccttcccgagtttttcccgatcgtggactgctacgaggaaatcctcgcgctgtccgcacggatgcacgaggccgcccaggcggctgactgggacaccgtcaccgcgctgcagcagggctacctggccctggtggaccgcctgcggcagatggaccacgaggcaccgttctccgatgcggaacgcatgcgccgctaccagttgctggaccgcatcctcacttacgatgcccgcatccgcgacctggccatgccgcagctgaagaagctcggcgacatgctgaccagctcgcgccgccagatcgaactgtccgccgcctacggcgccaccgcctgacgcagcctgaccgctgcgctactccccgcggcgggccggaaagcccgccgtctgcattcacgcgacccgtatgaccggcatccatctgcctccaggcctggcacccggtcaggccccggacccacaaccgctgcgcacggcgcttgccatcgacaagctgacggcgctgcagcccgtgcccgaggccaccgagtcgaatgtccagagctccaccggccaggcgatccgccacagccagcacgccaccggccccaacgccttggcaggccaggctaccttgctgccgggcacttcgacgcaggaatcgctgagcgcggcggcgcgggccatcctggcggtgatggacggtaccgaggcccagccggtgcgcagcgccggcccgctgctggccgccgcgcccacgccagcgtcggcgcaggctgcggcgtcggcgcttgccaacacggtcgggcagagcggcctgttctacgaatcgcaccttgcacagtgggttgccggcgcacgcgcgttgcccggcatccgccaggagccgcaggcgcaagtaccggtgccggcccgggcggctgccccaggcggcactgcgcaggccgccgcaaccacgctgccgtctgcgctgctgacctataccggcggtgccgcagcggcagagccggggcggccctcagcgccgccgctgattccggcctcgcaggtgctggctgaagcgctggcctcggccggcaatccgcgcgtggcccacagccatgcggcggcggaacaggcgctgcggcaaggcgccgccaccacggcggcctacagccgcgaagccgctgccgaaccgggggcccaacgccagtccgccgcggcgctggccacgcaggcctaccagagcaccgcggaggctggcgcgcgcgctgcagcgccggacagcctcatcccccacgcggcgcgcgccgccgctggcctgccggacaccgcctcggcagacgccggcaggcaggcctcggcagccggcccggccatccatccggcaaccgaaggcgtggtccgccagcagctggaattgctcgccacgcagcagttccgctttgccggcgaggcgtggcccggcgtgccgatggagtgggagctgctgcgccccgatgcggatggcgcagcgcaggtccataacgacaacgcccggccatggtccagccgcttgcggctggaattgccgagcctcggcatcgtcgaagcggtgctgacactgggaccggcggggctcgacgcccgcgtggcaacgcctgagaccgatgtcgcggcgcgtttcatcgcggcacggccgctgctgcgcaaccagctcgaggcgcagggcatcgtgctgcagcgcctgagcgtgcagacccaggacaacatgacggtaggagcggcgcgatgagcgaagcggcgcaagaccgcggcgcggcgatcgcgctgtcctaccagcacagggacagggccccgcgcgtggtcgccaagggctatggcgtggtggccgaagccatcatcgcccgcgcgcgcgaagcgggcgtctatatccacgattcgcccaccctggtgaatctgctgatgcaggtcgacctggacagccacgtgccgccgcagctctatgtggccgtggcggaactgctggcgtggatctaccaccttgaagcgggcagggccgcaggcgctgaagcgcaggcctgaaccggcaggccttcctgacgacaagagcccctggccgcttgcgcgcgccaggggctctttgcgttcagggcaggccggtgggctttacaccgccatattcatcatttcctggtaagccgccaccagccggttccgcacctgcaccccggtctggaacgacacattggccttctgcaggtcgatcatcacgtcattgagcgccacgccgggcttgcccagctcgaacgcctcggcctggccgtaggcgcgttcctgcgcggcgtttatgcggcccagcgagcgctgcagctcgccggcaaagccgccgccgaccggcgcggcggactggctggcactgttgcccgaggcaacctgggacatcccgcgcagttgctgcagcatgccctcgatggaagagatagtggtcatttggctcgtcgtatgccggtccaccggcagagttcgtcttgtggcgcgccccttgcatcacagtgcagcctgccggcaggcgggcttcaggcggttcgcacccagtttcagcccccgcagagtacccgccgtctccgcgctcccatgggccgaaatcggacaaaaaaccgcgtctattcgccggattgtcgcgctcaagtctggccgatcattgccaccgtgccggaagagcgcgggctgtcgtcccgtgctggctccggaaatcaccagacaatcatcgattcgggagtacgcgtgttttctctgcagcgtaatgtgagccgtgccgtgagccgcgccgacgaccaaggcggtcagcatcgcccgtgccgtcgccagcatcgcggcgccggatccggagcacgcgcatgaccgcgaccgtggcactgcccgggcgcccggcagaagtgatcgagcgcctgaaggccaacccgaagctgccgctgatgctggccggcgccgccctggccgcggccatcgcggtgggcgtgctgtggtcgcgcagcccggactacaaggtgctgtacagcaacctgtccgagcgcgatggcggcgcggtgctgcagtcgctgcagcagatgaacgtgccgtacaagttcgccgaaggcggcggcgcggtcatggtgccggccgagaaggtgcatgagacgcgcctgcgcctggcatcgcagggcctgcccaagagcggcacggccggcatggagctgatggacaaccagaaattcggcatcagccagtttgccgagcaggtcaactaccagcgcgggctggaaggcgagctggcgcgctcgatcgagtccatcgccgcggtgcagtccgcccgcgtgcacctggccatccccaagccgacgctgttcgtgcgcgagcgccagaagccgaccgcgtcgatcgtgctgcagctttacccgggccgcgccatcgatgaaggccaggtcgctgcgatcagccacctggtgtcgtcgagcgtgccggagctgacgcccaagtcgatctcgatcgtcgaccagcacggcaacctgctgtcgaacaccggcaacgagcgcatgctcgacgcgacccagctcaagtacgtccaggcgctggagcagaactacctgaagcgcatcgaagcgatcctgacgccgatcgtcggcaaggacaacgtgcgcgcacaggtgaccgccgacgtcgacttctccatcgtcgagcacaccgacgagagctacaagcccaaccaggacccgacccgctcggcgatccgcagccagcagaccagcgagtcgacccagcagggtgtcacgccgccgggcggcgtgcccggggcgctgtcgaaccagccgccggctgccgccgccgcgcccgtgaccacgccgcagacgccgcgtgcgggccaggcgccgggacaggccggtgctccggctgccgggcaaccgggacagccggggcaagctgcccagccaggtcagggcgcccaggtcgccaatgccaccgcttccagcggccccagcagcaatcgccgcgactccaccgtcaactacgaactggaccgctccgtgcgccacgtgcagcaggcaccgggcggcgtgcgccgcctgtcggtggcggtggtggtcaactaccgtcagcaggccgatgccaagggcaagctcgtggccgaaccgctgccgccggcactgctggcgcagatccagaacctgaccaaggaggcgatggggttctcggccgaccgcggcgactccatcaacgtggtcaacagcccattcaccgccgagcgcgagaaggccgcgcccgaggtgccgctgtggaagcagcccgacatgatcgagctcggcaagacccttgcgggctacctgctgctggcactgctggcgctgttcgtgtggttcaaggtggcgcgcccggtcctgcgccgctacacctcgccgccgctgccggcgccggaacccagggacgagaccgaggcagtgctgctgccgccggacgagcccgccaacccggaaatcctgcggcttgccgccaagtatgaaagcgacctcgcgctggtgcgcgacgccgcacagcgcgacccgcgcctggtcgccagcgtgatcaagaactggattgccaatgacaaccgctaagggcatctccgaatccggcctgcaaaagagcgccgtcctgatgatggcgatcggcgaggatgccgcggccgaggtgttcaggcacctgtcgcagcgcgaagtgcaggagctgggctcggccatggccacgctcagctcggtcacccgcgaggaaatggccgaggtgctgggcgagttccgcaccgagaccgagcagtacctggccctgaacgtcgattccaatgcctttatccgcagcgtgctgaacaaggcgctgggcgaggaacgcgcccagtcggtgatcgaagacatcctggagtcgcgcgatccgggcggcggcatcgattcgctgaactggatggacgccacggccattgccgagctgatccgcgacgagcatccgcagatcatcgccaccatcctgatccacctggaccgccagaagtcgtccgaggtgctggcgctgttcaccgaccgcctgcgcaacgacgtgatcctgcgtatcgccaccttcggcggcgtgcagccgggcgcgctgcaggaactgaccgacgtgctgaccaagctgctggcgggccagagcctgaagcgcagccgcatgggcggcgtgcgcaccgcggccgagatcatcaacctgatgagcaccgcgcacgaagaggctgtgatcgacggcgtgcgcctgcacgacggcgacctggcgcagaagatcatcgacgagatgttcctgttcgagaacctgctcgaggtcgacgaccgcggcatccagcgcgtgctcaaggaaatcgccaccgagtcgctcatcgtcgcgctcaagggcgcgccgcaggaactgcgcgacaagttcattcgcaatatgtccacccgcgccggcgagatgctgcgcgaggacctggacgcgctgggcccggtgcgcgtgtcgcaggtcgaggccgagcagaaggccatcctgcaggtggtaaggcgcctggcggatgcgggcgaagtgcagatcggcggaggcgacgatgcctatgtctgaggcaaaccctgagcgcggccaggccgcacgccgcgcgccgcgcggcgacccgctctcttcccttgccggcaacggcgcggccgccgatcctggcggctttgcgccgttcgagcccccgcgccgcgcgcgtggcggcgcggccggctggcagcgctggcagatgggctcgctcgatccccgggaaagcgagccgcccgaagccctggccgccatgccatccgagcccgcaccgccgccgatcgatttcgaggcgctcgacgcgatgcgcgaaggcgcgcgcaaggaaggctatgcccagggctacacccaggggcaaacccagggctacggcgacggccaccgcgaaggctacgcccgcggccttgaagccgcacgcaacgaggccacgcagctgcaggcgctggccaccaacttccgcagcgcgctcggcggcgtggacgaccaggtcgcgcgcgcgctggtgtcgctggcgctcgacgtggcgcgccagctggtgcgcaccgccctggcaaacgaccccgcggtgctgctgccggccgtgcgcgagctgctgaccagcgaacccgcgctgtgcggatcgcccagcctgctgctgcatcccgacgacgtggcgctggtggaaacccacctgcatggcgaactggcggccgccggctggaccgtgcgcgccgatccgtcggtggcgcgcggcggctgcatcgccagcgccgccagcggcgagcgcgatgccacgctgcctacgcgctggacccgcgtggtcaaggcgctgggccgcgacgatccatgggagccgccacatgcctgacgccgccgagcaggccacgccagcgccggatcccgcgctggcccatgcgcaacgctggatcggcgcgctggatagcgccgcggccggcatcgccgggctcgacagcaagcgcagctgcggccgcctgacgcgcgccgcgggcctggtgctggaagccgtgggcctgcgcctgccggtgggcagcgactgcctgatcgagctgcccgccgggcagttcaccaccgacagcaatgccccgcgcaccgcggaagcggaagtggtgggctttggcgccgaccggctctacctgatgccgcaatccgatgtggtgggcttgctgccgggcgcgcgcgtctacccgctggaaccatcgccgcagccggccggcatcaccacgccgcgcgagccgggctccaagcgcctgccggttggcgccggcctgctgggccgcgtgctggatgccgcgggccgcccgctcgacgggctgggcccgatcaccgccgccatggaggtgccgctggccggcgagcagatcaacccgctgatgcgcgcgccgatcgagactgtgctcgataccggcgtgcgcgccatcaacggcatgctgacggtaggacgcggccagcgcatgggactgttcgcgggctcgggcgtgggcaagagcgtgctgctcggcatgatggcgcgctataccagcgccgacgtgatcgtggtcggcctgatcggcgaacgcggccgcgaagtgaaggagttcatcgagaacatccttggccccgaaggccgcgcacgatcagtcgtggtggccgcgccggccgatacctcgccgctgctgcgcatgcagggcgccgcctatgcgacgcggctggccgagtatttccgcgaccagggccagcatgtgctgctgatcatggactcgctgacgcgctacgccatggcgcagcgcgagatcgcgctggccatcggcgagccgccggccaccaagggctatccgccctcggtctttgccaagctgccgacgctggtcgagcgcaccggcaacggccccgaaggcggcggctcgatcacggcgttctacacggtgctgaccgaaggcgacgaccagcaggacccgatcgccgattccgcgcgcgccatcctggacggccatatcgtactgtcgcgcagcctggccgaatccggccactacccggccatcgacgtggaagcatcaatcagccgcgccatgaccgcgctgatcccggatgagcagttcggctcggtgcgtcgcttcaagcagctgatgtcgcgctaccagcgcaaccgcgacctgatcagcgtaggcgcctatgtgccgggcaacgacccggagctggacctggcgatgcgcctgcacccgcgcatggaagccttcctgcagcaagacatccacgagcgcgccggctacgacgacgccatcgcccagcttcacagcctcttcgacaggagtgaacatgctcaagcattcaccgcttaatacgctggctgacctcgcccagaacgataccgatgccgccgcgcgcgagctgggcaggctgcagggactgcgcacgcaggctgagcagcagctcaaccagctcaccgagtaccgccatgagtaccgcgcgcgcatgcaggtggtggccgccgaaggcatgacctccagccgctggcaggacttctcgcgctttctcgattcgctcgaccatgccatccgccagcagggcgcggcgctggccaaggccgaagccgacctgctggcagggcgcaaccactggcagcaccagaagcgccgcctgaactccttcgacacgctgatcgcgcgcgccgaagcgaaggaagaccaggttgccgcgcgccgcgaacagcgcgccaacgacgaatacgcagcccgcctggtccgcaccacggccagccgcctgagcgaagcctgacccgggccacacccgtagccaacccatgatcgatatcagccagattgtcagcagcgccgccaatgcggtcgagggcgccaggcgcgccaccgccgacgcaaccgcgagcggattcggcgacgcgctgtcgcgcgcccgcgaaagcagcaaggcgcccgcgccgccggccggggaaaccgccgcgcgcgaccagcccgcatcgcgccagcccgcggcgcaggccgacgccggcaagccgcagccagccgccgcggccggcaagaagcccgcggccggccacaaggatgaaaaccaggaccaggatgacaccgcggcggccacgccgacggatgccgcagccgctgccgcagcggccctggcactgatgcttcccgccgcagccccggccagccccgctgccgcgccggccggcgcggcgggttccgccctcgccggcgttaccgacaccggcgccgccgcactgcaggcggcactggcaaatgccgcgcagccggccacggcagatgcccaggccgaggccatgccggcggccgccacgccgctgccggacacgctgcaggtcgtcaccaccgaagcccggcccgcacagccttcggttgccgaaacgctggccaccatcgcatcccagcgcgccgcgatgcaggccagcgccagcgcaggtaccgacggcaaggccggcacggcgcaggccatcccgggcgacgtgctggccgtccagcagcaggacgccagcggccagtctgccggcggatcgggcaatcgcccggaaagcggcatcgcccggcaccgcgccgatccgctcgccgccaaccccggcacggcggatgccaggcccgtggcaacgccgttcgccgccgcacaggctgccgcccgcaccggcgaggctaccgcggccagccccgacaacacaccagccgtggccgccgcgctggccggccaggctaccccgtcggctactgcagccgctgcggccgcccgtcccgtggtcacaccgcagctgtacgacagccagtggccgcaggccctcggccagcagatgatccgcatgagcacgcaaggccagcaaagcgccgaactgcagctgaacccgcccgatctcgggccgctcaaggtcgtgctcaacgtggtcaacgaccaggcccaggcccagttcgtctcacctcaccaggccgtgcgcgccgcggtggaagcggcgctgccgcacctgcgcaccgcgctgtccgaaagcggcatccagcttggacagacttcggtgggcgcagacggctttgccagccagacgggcaatgggaacgggcagcaacagcaggcaccgcggaatgggcgcgggcaaaccagctttgctgccggcacgctggcggctgttgagccggcggcagcagccagtacgacagcgcgtcccgcacgcgtgcctgggcgtggcgagatcgatacgtttgcctgagttcgcgctgtgtagcgcgtggtgattgcgtgccacggaagaaagcaaggccgcccgacgggcggcctttgtcatgtcggcggcgcaacgattcatgtacttcgctcacaatcctgcaaccagatttaacggattgctgctagaatcagtaaacatttttgcttacccttgatttcccctgaggtctaggagaatgcgggtgaagcggagtgaattccggcgatggctcgccggacagggcgccaccttcagtgaaggcgcgaagcatgtgagggtgtatctcaatggcaggaagaccacgctgccacggcatcccagccacgagatccgggaggggttgcgcaaggcgattctcaagcaactcggcctgtcatgagtcttccatctcacgccccaacttgcccttgtcgtcaaaggagtcccaatatgctgcgtttccctgccaacatcgtcccggacgacggtggctttgctgtgtcgtttcccgatatccccgaagccctgaccagcggcgacaccatcgagcaggcccgcgaaatggccgccgatgcgctcgccacggccatggaattctatttcgaagatggccgcccggtgccactgccgtcgaaggcaaaacgcggccagcatctggttgaactgccggccagcgtgtcggcgaaggtgctcctgcttaacgagatgatcgcgcagggcgtgacgcaggcggaactggcgcgccggctgaatacgcgcaagcaagaggtgcaacgtatcgtcaacctggaccatgcgaccaagatcgatacgatcgaggctgcattccgggcgctggggaagcggctggaactgacggttgcctgaccgcgccagggcgtccgtaaacctccacccatgactttcgacctgttcgacgacctgccaccgaacggccccgccagccccgccatcgaacccctcgccgacggcgccgtagtcctgcgcggcctggcccgtgcggatgccgaagtgctgctggccgacgtccaggccatcatcgcgcttgcgccctggcggcacatgatcacccccggcgggctgacaatgtcggtggcgatggtcaactgcggcacggtcggctgggtctccgatgcgcgtggctatcgctatgaccccgtcgatccgctgaacggaaagccgtggccggagatgccggcgagcttccggaagctcgccaccactgctgcggcgcaagcgggttttgccggtttcgaaccggatgcctgcctcatcaatcgctacgagccgggcacccggctctcgctgcaccaggaccgcgacgagcgcgatttcagcgcgcccatcgtttcggtctcgctgggactgcccgcggtgttcctgttcggcggcatgcgccgcgccgaccgcccgcagcgggtgcggctggcgcatggcgacgtggtggtgtggggcgggccgtcgcggctggccttccacggcgtggcgccgctggccgacggcgaccatccgctgctggggcggctgcgcatcaacctgacattccgcaaggcgctttagccatcaccgccgccttggcactttgccgggggttttctacagtcaatggactgtcctgaacgccaccgtgcaaaggcccacaccatgcatctcgacggctcctgccattgcggcgcgatccacttctcgcttgaatccgactcacctagtccgtatatgcattgccattgctcgatctgccgcaagacggccggcggtgggggctacgcgatcaacatcggcggcgacgcggccacgctgcgcgtgcgcgggcgcaagcacctgggcatttaccacgccgtgctgcgcgaacccggcaagcgcgcgcggcgctcgccggcgcagcggcatttctgcgtgaaatgcggcagcgcgctgtggctttgggacccgcgctggccggagctggtgtatccgcatgcatcggctatcgacacgccgctgccgcgcccgccggaggtggtggaggcctcgctggaatcggtcgcgccctgggtcgacgtgcccaagggcaaaggccatgtgcactgcgacacctggccggaggaatcgctggcggactggcacaagcggcacggcctgtcgtcgcgctgaaagactcccgttcgcgatatgaacgttttcatcggccggccttggcagctcaggcgggcaggaacccttcgacggtcaggtagcgctcgccggtgtcgtagttgaagcccagcacgcgcgcgttggccggcagcccgggcagcttctgcgcgatcgcggccagcgtggcgccggacgagatgccgaccaggatgccttcctcgcgcgcgcagcggcgtgccatctcgcgcgcgggctcggcatcgacctggatcacgccgtcgagcaacgaggtatcgaggttcttcgggataaagcccgcgccgatgccctggatcgggtgcggcgccggcgcgccgccggagatcaccggcgaggccaccggctccacgccaaaaaccttgagctgcggccacttgtccttgagcacgcgggcgcagcccgtcaggtggccgccggtgccgacgccggtgatcagcacatccagcccctcggggaagtcattcaggatttcctgcgcggtggtgcgcgcgtgcacgtcgacattggcgggattctcgaactgctgcggcatccatgcgcccggcgtggccgcaaccagttcctcggcgcgagcgatcgagcccttcatgcccttctcgcgcggggtcaggtcaaaggtggcgccataagccagcatcaggcggcggcgctccaccgacatgctgtccggcatcaccagcaccagcttgtagcccttgaccgcggccaccatggccaggccgatgccggtattgcccgaggtcggctcgatgatggtgccgccgggcttgagcacgccacggcgttcggcgtcttccaccatcgacagcgcgatgcggtccttgatcgaggcgccggggttgctacgctctgacttgatccagacctcgtggccgttgccgaacagccggttgatgcggatatgcggggtattgccgatcgtctgcaggatgttctggaccttcatcgtattctccgtggcgggcgcggtgtcgcaggcttggaagccgctggcaccgcaggatcgaatgacgggatgattttagagcaaggcgccgctcgggctgcccgactgccgccgtgatcgtgatgctggtgcgcggctgaagcgcgcgcaacgggttacttgcggaacaccaggcagaggggttcgccatcccggtgacagatacgaaaaccgcttatatatagtgttattccgtgtgtgttgatggtttttaggtgccccaagccggcgatttggggcacttccgccgtagtatggccgtcccaacaacacacatataggggtgcactaaaatggcaaactttgagcacaggggcaccacggttcgtgccctagtccgcatgaaaggccagcgagtcagcgctactttcgacaatgagaaggcggcgcatgagtgggcgcggaagactgaaaagcgcatcagcgaaggcgaaaccatccgcaagtacgatgacaccagcgacccttccgtcgcctatctcctagagaagtacgcccgcgatgtttctggtggcaagcgtggggctaaggttgagcgctatacgctgacagcaatgtcccgcgactttccggagatattcggcaaacgcgtaagtgagtttcgcaaggacgatgtggaggcgtacatcaagaagcgcggcagcacgacaagcaggtttggccgcaaggtcgcaccgggcacgataattcgtgaggtgacggttctgtcagcggtgtttagctacgccattcggcgctgggaaatgccgttctttaagagggagaacccagcccaaggcatcgacaataggccaaagtccacagaacacaggaaacggcgcgtcagtgacgacgaggtcaaactcatttgcgcacagctcgactatgtagagggcactgtccccaaaacgagcaagcaatggactgcatgggtctttcagttctgcctagcaacagcaatgcgtaagggtgaagtgcttgccgcaacgtggcagcacgtacacaccgacgagctatatatccatttgccggaaaccaagaacggctacgcccgggacgtgccgctaagcccacgcgcaatcgcactgctggcaagccttaagcaaggcaagggcgctcaattggtcgcgccagtcaaatacaagaccctggacagcgcattctggcgcgccaaaacggagatcggcattcagaacctacactggcacgatagtaggcacgaagcaacgacgcagttggcaaagaagctcacaaacacccttgagcttgcagccgtgaccgggcataggtcgctggcgatgctgcatcgctatttcaacccgaccgcgacagaaatggcgcgcaagctcgtatagaggggcggcatcatggaacatcatcaaggtttccccggtcgcgagttgtacgaaatccggcgcgctcacgcgatccaacagcgcatgactgagccacccgcatgagatgacgcggacgcggcgacacacaacatgcttcggatgtggcacgacaagattgaagcgtggatgctggaacaggcgggcatcgactttacgcccagcgaagtgcaagctggcttgagtgctgtaaagtagccgaagtcagtttgccctcccacgccgatggacggaaaggccagcccctatcccgttccggcggaaacgcccaaataagggagccatatgacacgcgcgaacataaaagaggtgtttcactggataggccatcggaccgccgaacgccgccaagcggctgatggtggctacttgtatcgcaccccagaaaaccaaagcctcgccatcgccttggccgtcccgctgttcagcacagctgatgcgacgtataagggcgccaacctttgggagattgatgggttcgtcgagacgttggagtcgacgtgcgaccacgaagccgaggccttgcgttcacgactaaacagggtgcgcgaatgctgggcaaattcaggtgacatggagctctgtcgcgcccacattgacgttttgaacgaagccttgttgcgtcgatatgaagtagctcgcctgcgtaatctcgccaatgcacatgaggcacttgcaagggctgcaatactgtccgccgatgcaaatacgccgttgccgttacacgcaatctcgttagatgcgaagcaacctacggaaatccgccagccaaataccagtacagcagcggaggcaagcacctggctgtcaatagcacggaagattgcgctcgaatttatccagcgccatagggagaaagggctcgctccggggctgcaggacgtctccgatcacgtcgctaccgcgctgcgctcagctgcaatttatgggcaccataggcgtccgctgtctgcggcctacatcaagcgcaatgcgctccaaggcgagtggtggaaaaagaacaagccacaaagggactagacggccgggggaattggaggatgtcgtctccccgccgaattcccatcattgagaaagcaggcaagaagccagcagccataagggtctgctggctttttattttttccccttgcggggaaaatttccccgtactggagtggaaacgcctctcaacacaggagagtttccatgaacatctttcgctccgtgagcgctcatgcgggcttgcccgacctccttactactgcagagtttgccgccgcactgcggtgcgcacctcaaaccgtcaggaagaatctctccgccaaagggcatcaccacggtatcaagccgctgaagcaggctagcggcaggctcctgtggcgcgcctccgatctgatgaaactgctgggtattgagacgcagtaaagccggctaccggcaattgctgctgtcgcgctcgctccatcgctcaatcggagaggcacaccatggaaaacggccattttgagcaaggccgcgcccgcgacgcgctgtcttgcctcgacgccgggtgctcacgtggcgaatggattcgcttgggcatggccgcgaaggcggccggcctttccttcgaggacttccatttgtggagtcagaacgcgccgaactacaaaggcgaacgcgattgcctgacggcgtggaactcctttgacgatggcccgattaccgagtcaacgctctttcgcgctgcccgtgatgccggctggcagggtctctataaggcgcctcggaatggcgtaggcaccatccacgcattgatccaacgcccgaaggaacaagccgaaccacaggtcgctccgaaggtgcgcatcgatcctgtatccgcttttgacgcctacccttccgctccggcggagcatccctatatcgtcgccaagcgcggcacggcggacggtttgcgcattgtccccatagaaaatccgctggcaatccgggggaggtccgtggctggttacctagccgtcccggtacgctcgctcgacggcgaactgcggacggtccaatacatcccgcctccgggcgcgggcgagaagctgaacgcgccaggcgcttccttcggtagcggcatgttcgtcgtcggcgaagtcagcgccgatggtcgcatttacatctgtgagggcatcggccacgcatgggctgtggcgcgcgcagactatcaagcagctgccgtcgtcacgtttggtgcgggccggtttcgggtcgtcggacaagctctgcgtgagcgctaccccgatgcgcgccttgtattcgtggcagaccgtggcaaggaagccgaggccgaaggcatcgcccgcgaactctgtggctcgtgggtggtcgcgatgcccggcgacaagccgccgaattacgacgcgaatgactacgaactcgagcacggcaccgaggcgctggagagcttgctgcaagccgccaaggcaccgcccatgcactaccagttgcaatcgggggccgatctgatggacgtgcccatgccgcgctggctagtgcggggcgtcctgcctgccgatgccctcgccgccttgtttggcccctctggctccggcaaatccttcattgccctggacctgtgtgccgccatcgcagatggggcgccagaatggttcggtcgccgcgttactggcgcgcctgtcacgtattgcgctttggaaggtgcgcgtgggctgcaaaagcggatacatgcatggactattaggcaccatcgtccgttgccggctcgcctgagatttatcacgcagggcatcgacctgcgtaaccaggacgacatcgcggacctcgctgccgccgtcgttgctagtagcgcaggtgatggcctgttggtgcttgatacgctgaaccgtgccgctccaggcgccgacgagaactccagcagggacatgggtgacctcatcgaaggcgcaaaggagttgcagcggcggattggcggcgtcgttttgctggttcatcacactggaaaggacggcacgaaaggtctgagggggcatagcagcctatacgccgcgctggacgtcgccatcgaagtatcgcgcactgacagccgccgtgagtggtccatcgccaagagcaaagacgacgaggatggtgctcgggctgccttcgtactgcgggtggtggaactcgggagtgatccagacggcgatccggttacatcctgcatcgtcgagccagatggggcaaccgccgccgacacggtgcagcggttgaagctaccgcaaggctcgaaccagaagattgcctatcaggctatcggggagttgttgcgccatgcaaaggacttcgacaaaggcggcgcgccgaacggtcgcccctgcatccagatcgactccgcatttgcagccgttgctgcgcgaatgccatgcgccgaggaaagccgccggtacgtcgcgcggcgcgcggtaaccgcaatggtcggcaatggcatttaccaagtccgggaaggctggttatggcacgcatgaaaaacaccaacaaattccaacaaacgccaaaattgttcggttctgttccctaacagattccaacacacccctttaggggtgttggaattgttgggcaaatccgcgccgtgggcgcaccttcgatgagaggtgaaagagatgacaacgttaattcaacccccgatctggaatagccccaccgacgcggtggccggcctcgcaccgttcctgaatagcgagaacgccgttgaccatgttctcgtgaaagtcgacgaccagaacgtcgctcacttcgacaacgggccgctctatagggaagcccgctacgtctatggctacaccggcacccatcccgccggccccatggccgcctgctggtacgactcccgtacgggcttgcggttgcacaacgtttctgcgtggacgcttgcagagtagtaaaacggcaccattggagaaccaccatgacgctattcagctttctcgacagagcccatctcactaagggtgacgaaaaaaaactgcgcgacattctgaattcggctgaggccgaggaaatccttgctcgcgtcgaacagaccaccatcgatatgcgcaaagccctccgtcagcgcctcgacagcctggacgcacggcacgacaaaggtatcgctaccgccagcgccacccatctgaaagcgatccttgctcgcgaagccgcagaggtgcagctcgcagcggcgcgggccgaggaaagcctcaccagtgctgctagctacgcggttgaggagattaaggccacagaagccaaggaactgaggcaagcgctgatcgattcgcgcgacgaccggcttgacgactactaccgggagctggatagcgccttgggccagtcaaggcatctcactcgcatcacctcgtttcgccatggctcttggctgggggaccggatgacaaggtacgagtccaacgccgagcaagtgacgatgctccggaggctacttatggatgcactagaggacgtgaagagcatgaccttggaaccgctgagccgcaatgaggtgtccgagcggcttacagcgtggagccacaagctggagtcgcagctcaatgcattctcgctggcaacaccccggctcgatgagaacggcgctgtggcatcgagccgcgtgccactgaagttcgtcgaagtgctccaggccaatggcgtagcggagccgggcgacgtcccgccgcaaaagccgccggcggcgcaaccgcgccctactgcctcgtctgtgtccgagtccgcgcatgcggcattgcctcaactggctggcccgaggcgctccgattgcgcaaagccgaagtgcctcgccgtcgcgtcgtacgtcaatccgaagcttacggcagcagatcgtgcacgggctagggagttgggctggttgcgggagcgccacaaggcggctcaagcgtctaaatccgagatggctcaacttgtggatatgaacggcgcgctgattgatcaccgtatgccgatcaagtagaggaaagggctgctccggtttcggggcagccccttgcttgttacaaaccgcacaggtcctccgctccagagtactcctgcggttcactaatctgttgagcccacgggcgaatgtgctcttcttcatcgaagattggcggtgccttcaattagagcaagactgacggcctagtcccagtcttggtcggcctcctgcccatcagcattgcttatccatagttcgccatcgtcataggcgctaacacttagctcgcgatgtctatagcggatcgcggtcgtcgataccagtctaatgcttccgtccacatacttgagccggaacgcatcttcaggcttgtcggtaagtagccccttgtcggcgaacaaaacgatgtttattccgccggctctctgtaccgaagagaagaggattccatcgaatggcttctcatggacatgggcaaggtattcagccatcgtttgagtaatgaggtaatctgactcccggcctggaacgattggctgagatattaggctgtggagtcggcgcaggaattcgcgacgttcaagctggtcggtgaaatccgtttgaaagtagctcagtgccttcccgctgcgtgcgtcgtccagacgggtgaagtccagaacgcgtagcgcatgcgtggtctgcatggtaatgattgcgacctcgcttccgagcgccggccgcatctccgccagacatgtttctgaatctctcgccccatataaaactacgacgccctccgcattcatgcggccagctctagcgttctcggctggaggcggccctacatgctttatcggatcggcgtagatttctttgagaagcgatcgcgagctacacaagcgggctcgaaagatcttcgtcccctttggcaggacgcgaacgacagggtggagtcgagtgccttttctggcgcgcaattcatcgattccttgaaacagcttctcgaatagtgcgcgcgcggacgggctgaagaaccgacgcccatgcttcagttcattcagtgtgtaactccactcctcaaagtagcgaccagtgcgaattcgtgtgggcacgtagttacttgtttcatcccagtaggcctctccaccatcgcccggccagtagtcatctgcgtcgacaattgcagagacaatctcgtcttcgaagtcaaagtactggcctagcacgtcctggacgaaatacgaaagtgagtcgccctcttgttcccaccactccgaatcgttgtccccgaacctcttcaccgtttggccaaggccgaagtgctcgcgcatgatcggctccatgatttggccaaggcgtcggattgtgattgcctcgcgctccaactcgtcgcaaaccgagcattcaatcttctccccctccgccttgatgatctcgcttaggtggagatctttgacgcagccgtagcagactgctcgttccataaatggcgctcctcacgtagattgctcgagtaattttaccgctgcggcatgtccctcggtgcttcggcgtctccatcattaaagcgtcgcagcttaaatcgtcaggtcatggtcagccggctcggtgttccatggaggtaagcacggctctcttcgactgcgaagggcagcctagaatcgttcggtgttctggcagaggtagtggattaggccatttggtcggcttgatgcgcaggcggcgcaggctcgataatccgggaagtcgagatccagggagtcgataatgcgacgtctcgtttggctgttgctgttcgtgatggcttctgcgatggccgtcgagtctgcgccagagctgaggtccgccgttgaacaaggggcgcaaggttccagggttggaaagttcttttggatacggccaacacgggatggaaagtcagaggttccgatctatgaaaccgtggaaggcagttatgatgcggtttatgtgacaagagtgacgcgattcaaggtcgtagggtatgaccccgcaggagctgggtggtaccagctcaagttcgacgacggcaaatcgggcatcatcccgtggcgggtattcgaggacttttttggatactggggctacgcccaaatcctcgaggaggatcctgctgccatccaggctagagaagatgctgagaaacgggctgagcagttggccactcaacgggcggcgaagcgtgaacgcgacgccgagcgtcgccgtatcacggcagccaagcagcaggcggcgaaacctggcgtcaggatcgggatgacgagtcagcaagtgctcgaggacacccattggggaaagccgcagtatgtcaataagacccaaaacgcctatggaataactgagcaatgggtctatcggactgggaattacctctatttcagaaatggtgtattggaaacgatccagtattgagccgccgccttgagaattttgatagagattgcgccggttatctttaacgcgcgctggtgatggctttattcagcgcgcgacatctaccgccacttgcctttgctagtcacttaatatggtaacggcccggccattcgccgggccctgaaccactgggctttactctatttccacgatacgtgcctccggaaccatatattcaaccatcctcctgttggaccacacatcgggattcgtcgaaatctgtatatagccggaggtcctcaccacctgtggcacctcggatcgacggatgagccagtacacccaaggcgagtcgtcaagatactgggcggagaagcggtcatctttctgggcagtcagcacaagccaatcacactcggtgtgagcgttgctgaacgaccaacgcttatccgtcgggttcgcgctcttgacctgcaatgtcttacccgttctcgtgagtacatcgtgcgcatctgcgtaacctggagaaactgttccgccaactagttcggccacgcgaaattcagcgagtttgccgtgatgcagttccttcaacaggcgaatcgtttcgcactgttgccgatagaagcccaagggaatagaaatatacgagaccggctttccgtcttcgatttgacgggtgattcgatgcggcatttcgaatgctcctttcgctgtggttgagataaagcagcacgcaaggagcgaagtcggcacccgggactcgagggaacgtcgcgcacattgcgtgcggccgctaatcagtgtgattagcaacttttgactagcccctctgggccccgatatcgcgaggacatcatgccaagtctcgaatttagcgccgttgcactgctttgtcgagtcgaccaccttcatcggggagaagatcaaggcgcacgccggacaagacactgctgagcgcggctatagcggcggaagatgcaaggctcgtgcagcgtgatctatgactgaaatcaccacttatcgtcgacggggatctggatcaccgactcacggccggtcgcggcgccacttcggcaagccggcatgcccaacggtctgcgggctgcgaaaaagatggaatgtagcgctggctttcgtcggcgcaattttgcgttgacgctcgtttggacgtgcccggccctaatggcgcgaagcggaaagagccccgtgtatcgggatgacgaagacgggttaattgtcctcgccatctctatacgacggcggcttttgcggtcgggtgctggcccccgctagatcgagcgcagagcgcatgcacagctgcaagcgacgtggcctagcccgcacgggtggggagggggtatcgatctctgcatgttgcggcgcggtgatcgcgcgtgagctgcgatttttacggacgcgattttgacaccggggggggcggaatcgccacttccgagcgctctcgcatcttgtgcacttcggcctaggcgttatctgagcgtgtgcagcggcattgaggcctgcgtcggtggcgtggtccgacgctgcagtggcagccaatcgctttcagtgagatccaaccgttcacatgcgccttgccgccttcgggctgggctcacctacgcactgaaggcgaaccgtctattccactgtgcctaatctggaagccgctgcgcagtaaacaattgcggcacgctggcaatcccccaaggcccggtgcatatcggaagtgtccaagttcccatcttttgcaatctcagccaatcggtagcttttccggtcgggccatgcacgccgtgacatttttagtgcacacgaaactggatttgcaaatgttatcgaactctttccggcggccttggaaataaaggccatatcaaattcggcattgaacgatacgagtcgcaagttgcccgcgaatttggcaaagtcttgaactgcagactctagggagactccctctgcctcaatcatttcaggtgttataccggtaagttccgtaatttttttcggtactttccttgatggctttaccaaaacctgaaatgtatcgtgattgtttgagtttcgattcactcggattgcacctatttctaggatttcatgtcgctccgagtcaagtccagttgtttcaatatcgaacacaacaaatcgctccggaaggtgtgccagtggattgctagctaccagtcgagaagaagtgctgaaagaagttgaaggaactggatcgctgctgtccttcgttaacttataaatgaggacggcaattaaccctataagcccaaggaaaataatcaattccataacgcttcctttcttgaacctaagcgttcgggagtccggctcccatgcctagtagatccgtcttaacctaccagttttccgggcggcaacccataccccactaaagaggggacataacgttcttgctccgtccacccgagccctacccccttggaacgcatgccatgatcttgtcgtagtcctgcaggctgatgggcggcgttttcgctccaaatgccgctgccgctgacgctgcggcagagttaccctcacgcgccatgctagctaccgttgccttcgccttgttacaagcatctaggctcgcatattcacctaggtacacgggattgaagatgacccatagcaagatgtaggaacattttgactttttgtttttgattaacgtcggacgtctatcggctcggcgcgaattcgactagcgcgttttcctaaccactaatagcgtctagcggcaaatatcgcggagttcgccgacaaatgcgcgaaccccgtcaaatggaccccagccggacattgccttcgtgtaagtaacttttcttgccgtcggatcgacggcccaaacttccatagtcgatctgccgttctcaacggttccgcagacaatggaatttggcgtgaggtaattgcagggcaaattagagggggaaacactgcttcgcgaaggctcgacccttacctgaaaatcggtggaggagattccatctttagtgagggcgtattgctcaccagaaagcgcgctgtagccttttaggccgccagcaacccagcactcagctatggcaggagccggaagaaggctgatggcgacaatcagactcgctatcctcatcttgttctctcatgtctttgaatggggactttaagagtagcatgagccaatcatgatgaacgatttggaaccccaagaggaaggcaataaatcccggaccctccataggtgcaatctatcacacgagactcaggcgcaggatgcctccaccaccagtacaattctgggccatcagaaaacaaacgagcactgactgggaggctcaccgaatatgcgactcgaagccgtagaggttcttggattcaaacgcctgcagaaaattgagctgcttacaccgtcaatgacagtgctcgtcggaggcaacaattcaggcaagtcgtcgctgcttcaagccattcatttcgctgttactgttctccagtcagcccgtctctccgctgatggggggaagccaatgaacacgcttggtttcgatcagttcatatacaagccaacgggcgaccttattcagctcaatcatggcactccgattacgtcaaaaacgggcccggagttcaccttcacctataccgatgccggcgcagcggagcatctggagttccaactcaagttgcgtcggggaaagaatgcgaacatcgcgatcacgtttgaagatgaaagcacgttctttattcgcgcagccaatcggagccagcctttttctgtcttcgtgcctggtctagcaggagtgcctcttcgggaagaattaagaacaccatcggtcgtcgcaaacggaatcgcccaaggcgattcaaatatctatcttcggaatgttctttaccgaatctgcaaagacgatgcaaagctgatgcgattccacgaagtgatcgcctccgtcttcccaggtctaaccatctcaacagcattcgaccccgaagctcacctgtacattgatatctctgtgcatctggatgggcgcactgtgccgctcgaaatggttggcaccggcgcacttcaagccattcagttggtggcatatgtcacagcctacgatccggcactccttttgctcgacgagcctgacgcgcatttgcatccgtcaaaccaaaagctattggcattgacgttacagaaaatagccgaggccggcagcaccaaggtaatcttggccacgcacagtcgccacatgttcgacgcactcgcacgcgacgaagcaacccaaattatctggctgaaggatggaggaaagcaggaaggagccgagcggaataacctttccgtgttactcgatctcggcgcactggatagcttcgagttagtacacgccggccaaaaacgaattgtcgtcctcacggaagacacaaaggtcgctaggttggaaatcttcctgcgtgcgaatggcctgaatgatgccgactacttcctccaacccctacacggcgttaacaatttggcggcagcggtccccatcgccgattactttacgaggcaaggtgacaatactcacgtcttagtacatcgcgacggggacggcatgacagatgctgagaagacttggtggctagagaacgagtcaaagaagctgcctgatcgaacaactgccttcatcacgccgttcactgatattgaacataccttctgcaggcctgctcacatttcggccgtctacggtattcctgaagctgactccgaagcaatgatggcagcaatcatcgctgccaaccaagctttgcttgcagccgagtttgcgcagaagagagttagcctcaaggacaccacacttaaaaggatgaaggacgcctcatccgcaacagacatgctggctggcggtttgaaattcgaacacatcaaaggcaagaggctgatggcgcttgtgcaaacagctcttcaacaggcggggcacaacccgatgcggttgacaagcacaccatctgcagcgcttgtgtatgcacctctgcgcgacaaaattgccgccatcaaggcagcagtggctgctgctgaggcagctgctcaggccgctgctcctgaggctgccgctggggcagtggctgaagtggctgctgccggcgaggctgccgctgctggcgaggttgtgcagcaataggctagtggactagtgcgcaaaccgcttcggcggcaccgcgccgggtccatcgccgaccgcgtgagcgcgtccacggctcgttagtaggccacgctccgaagtagaatgctgccgaatatggaccgttcggagaccaatggtggcatttcaaataaaacgtattgtcgtgccctatgaatcgctcaaggaaatgggcgccgagaaccaatatgcgctatatctgcttgggcacatttacaacgagataatgtgcctaaacaggtggtcggtcctggcgaggcgagatgtttctggcggtgtcgacgcagagcaggccggcgcggtctttaatatcatgttcgtgacgcggattctggctggaaaactatacgaggcaaagttaataattagccagaaaattgttaagcagttcctagaaggatattgctacccacatatgccagaatcagacatcgccggattgaaggctctcaacagggctatgtcacaatgtaagtggattaatcccgcaaggaatgggcatgcgatgcattacccggagtttgagaactgcaaagaagctataaatgcattgaattttgggaagcaaggttttgagatttttgctggcggcagcttcggtgcgacgatgtatcgcacctccgacgtcatggcaggagccgcctttattttcgaggccaatagagattggggcgtcggcttaaacacaattgtcgaagacgtgctgagcttaagtcatcaggtcactgagttcaccaactctgcaatcggcgcttttgtcaatagcataaagtctggctctcggtcatatagcgaaagagtcaagattaaggatgttccgaaatttcccattcctgatatgacggacttcgtcttgccatacttcatggtggtaagggacaaggactaacgtcggaatctcttgaacggtactgcccccggccgcttaattttcatccagtcgggcgagcgctcgccatcccgatacagcgacccggcgcgcttcccgactactccctctaggccgagcgtgagaacgtggccgtacagccatgcgccatcctctatgctgtccacgtacaggattcccgccggcgaatcggccaacaatcggcggagtgccgacttgcgacgctctataggctgcccgcacaagtcttcccccttccctactagcaggtcaaatacgcagtgggcgaccaggtccgcgcgcttgtaccaacccttgcgccgggcccgcgcccgcaaccgctcgaagtcgctccggcccgatgtcgtctagctcgccgactatgaactggaacgggtagactacttcctggcacaaacggtcgagcgctggggagcgcaaggccaaggcccgccgccggtcagtagtcaaacggcgatggatgagaagtcgggcgttgctggaaagagcagccttcacaggtggaggccaaaaacggcagtctggggagaaataacagtgaaactccgatttaaatccctactcgcattatcaatagcatcaatgggaacagcgaatgcggccccgttcggagactgggctacgggaacgaccaccgatgggaatctctacgctgccgttgtaaatgagagccagagcgtgttaatgaaggtttgcgtttcgggagatagcacttgtatttggtacctcggcacgcaaaccagatgcgaatctggaggaaaatcccctgccctcataaattcatcacttggtgcgacgactgtggaattggtctgcgacagacaaattcaactgcgcaatacaacaggcctgcattatcgctatgccatcctcaactatgaccttatggacaaaattgctgcgtccgcaactggcgcctttggcattgccgtggctctggaaagcggtcgatttgcagtctataggttctcgagcagcggtggaaagcaagctgtctcgacgctagaagaagccgcactgagactatacagaaaaaacaattctccggcgccagcggcaaatagagactcattgctataggcgcatcctctaaggcgggagcgtttagaaatgaaagccaaccgagctgccccgtcgaacgtaccgcagaaaccggcgtgctgaaacgcctcggttgacacgactcacataaaacaacgctttaggagcgagaagtgaaggtcaaactgttcccgttggtggccgttgctatgctatccacgaacgtcatggcggctaagtgggaggcaataggcgtaggcggagagaacactctcttatacgtcgacgcgacgagcatcagtagtagcaaaggtctgaagaaggcttggcttagatacagctacaccacaccgcagaaaggcgattacgtcaccaaattcaaggactatcgatctgtccttacaatgaaccatttcgactgtgcaggccgtcgtagcgccgtgtccaagcaggttatctatgagggggatgatggcacgggtgaggttctagggacgaactccatcaagaacgtcgagaatgcgctagacgacgtaacgcccggtacgctgggagagactgcgctgatacgtgtttgcggaaagtgacttccgaagccgaggcgagtcgctgagggttgcccggcaagaggggcacaatgaatgtgaattaccacgcatacttccgccaaggcagttgtatgcacgctgcgtcacctacggaaagtatagtagtgccccaatttgccccaaaattcagctaactatttgattttattgagatggaacgttaggctgaagttgttggccggcatcggcaccggctcgtcgcagcgcatgccctgcgcctcgcccaacgcgatcacggcttccatgtcgcgcacgccccagtcggcatcggtggcgcgcagctgcgcgtcgaaggcggcgttgctgggcgccgtatgcgcgccgccgcggcgataggggccgtacaggaacagcacgccgcccgggcccagcagcttgccggcgcctgcgaagagcgcctcggccgcagcccacggggcgatatggatcatgttgatgcagaccaccgcatccgcggcgtcgatgccccacggctggcggcagacatccagcgccagcggcgcgcgcacattggccaggcccgcatgcgcggtccacgcggcgatcgacgcgcgcgcggcggcttccgcatcgcttggctgccaggtcagtcccggcaacgctgccgcgaagtgcacggcatgctggccggtgccgctggcaatttccagtaccgtgccgctggcgggcagcactttgcgcaataccgcaaggatcggctcgcggttgcgctcggtggcgggcgccatgcggcgtgcatcggggtcttgggtggagccggtcatgatggcatgctcagcgggggaaagcgcctagcgtagcagaatcggcgcgccggggggcgcgctgccgcagtgcgtcaacggccccccggaatccggtagatcaagcgctcaaacttgcgcgtcgtggcctggcccacgaccgtgccgccaagcgactctgcgatccggcggctgggccagttcggttcggccacgggatagaccaggtgcgccggcgacaggttgtcctgcgcccattgcgccagcgcagtgaccgcttccaggccgaaggcatggccgtggcagtcctcgcggatccagatgccgagttccggcgcgggcgtgtcggcatggtgcaatcccgccagccccaggaacagcccgtcgtcggcacgccggatagtgagcacgaattccgagcctcgcgccatgcctgccagccagccttgccacacggtctcgaaagccgccggcgagggcgacggatcccagtccatgaatcgggcaagcgtcggggtgatgcaggcaaacgcctcggctgcgtcgtcgccacgaaagggcagcaggctgaggcgcgcggagtggatgtgcggaagctggtcaggcatgacgggcgggaggctgggcatgaaccggagttgtcatgttagacgatcgtgccccaataaaaaacggcgggccgaagcccgccgccctcatcggcactgcgcgacgcgtcaggccttggccagcctgacgccagtcggatcgcccgtcaggtaacccacggcggcaccgaagcggtccttgtagttggccatcaccttcgcttcaagcgtcggccgcaccttgtcgtgcagcggcgattcccagtcgccaacgtgctggaagttgctcatcacataagtccagccgttgatctcgtccaccgcgtgcaggccggtggattcggcgccgaccgggcacgacagcacgcggctgagcaccttggtatcgacgttgtacgcccacaggaagttgttgacgtgggtgttgctgtcctcgccgacaaacagcgtgcgcagcttttccgagaacttcaggttgtcgggcgtggccaccttgtccgggttggcaaagttgcccagcgcatcctgctgcttcatcttgccgccccccaggtcttcgctgaccagcgcgggcaccgccgccatgtcgaccggcacccattcgctgttgatggccgtgccggtcttgtcggcctggccgcccttcaggttcagctcatagaccgcgccggagtacgggccttccacctggatatcaccggcgttggcggcattgcccgtgagcatgctcgactcgatgcgggacatggccgagtaggccttcttgtccttgatgttgaccgtggtgccttccatcttggtgaagcccaggctgccgccgaccagggcggcgtagcggtgcgtttccaggaacgccgcggccttttccatgcccggcatcagcttcacccagttcggcttgccgttgtagatgatgcgggtgtagctgacgtcagcgggatcggtggtcttgacatccatgatgtcggccagcctgatgccgccgtcgaccagcgcgcggatttcggcactggtggcgctgcccagcctgatccacgacagcgtggcgctgcccgggcccacgcccgaggtctggtgccacttggccacgtacagcgtgccggacgacaggtcgcgggcgcggtcggcgataaacaggaacaggccgccgttggtggcatcgtcgcccatcagcacggtgcgttcgtcgggcatgacctgtaccagctcatgcgagatgcggcccaggcagtagtgcttcttgatggtgccggtgccgtccgggttgaccgtgacttccggcaggtggccgtagttgtaggcgttggcgcgggccgggtcgccgtacaggttctggctgtagccctgcaactgcgtgaccgcgctggcgttcagcaggtcggtctcgtactcctcgctcgacaggtgggtgttccacggcgacaggctggcgccgcaggtgatccacaggccgttgacgcccgaggtatcgacattgtggtacttgaccggggtcagcttgccggtggccgggtcctggtccagcgtcaccacggcgatcggcgacggcagcaggccgtacatgctgacattgccctggttgcgcgtggtgtactcgaactgcaccaccgcaaacaccgtcttgcccttgacaccgggcacggtcgggttggccagggtcagcagcgagctgccgtccggcgcgtcggagaaaaactggcgctccttgccggccactgaggtgtccatgatcggcttgttgttgatgtcgtagtagccgccggccaggatggtgccgcccttgccgtcgggcagggtgtcgccggtgatgaagaacggctggtaggccagcttgtaggtctggctgctgccgtcgctgaacgacaccttgaggctggagcccaccgtggtggtcgccatggcgtcgggcgttgccagcgtcggcgcgctcatgccaacgaattcggccgtggtgaacgtggccgcctgggccggcggaagcggcgcggcgacagcgtcgtcgccaccgccgcaacctgccagcaggctggtggaggcaaggccaagcggcagcatcggcgcgccggccaggagcttcagggccttgcggcggcctgcattgggttgttcaagcatgttctcgatccggggaagaggaagggatatgttgttcactgcgtatttgcgccggtcccgcgggcggggccgggcacctgttggcacaggcgggcggcgggcggcattgcgcatggccggagcggatcgtaggcgctgtttgtgacaccaagttgacgatacaacacaaaagcggcgctttcggctgagccaggatgccgctgcggtacactcgccctttgcatccgcggctccacaggcgcggatccgttgaatgccggcagccgccgtttctgcctacttccgcccttccgcttgcccacttacacgctagccaaccccgtccgggccgagatcgaaatccgcaagagccgcttcctggcgctggcgctgcccgttgccgaccgtgacgccgccatggcggcgctgcaggcgctgcgcgccgagcaccccaccgccacccacgtgtgctgggccttgctggctggcggcgcctcgggcatgtccgacgatggcgagccctccggcactgccggccggcccatccttgaagtgctgcgccaccatgacctggacggcgtgctggcggcggtggtgcgctattacggtggcgtcaaactgggggcgggcgggttggtgcgcgcttacaccgatgccatcgcggccgcgctgaaaacggccgagcgcgtggaacgcatcgcctacggcaccctgacggtgtccgtcgactatgccgacgagccgcgcgtgcgccgctggctcgactacgacgcgcagccgggctgcacgctggccgacaccgcctatggcgcgctggccacgctggtcctgcgcatgcccgcaacccagctcgacgccgcgcgcgacgccctgcgcgacgcgacccacggacgcgcccaattcccggaagcggagggtgaggaccatggctgaacgcgagccggtggcgcccgacgaccgcgccgaattcaccacaagcgtgctgccaggcaatacccgcttcgccgcgccggcggagctgagcctgctggaagctgccttgctcgaaggcgtgtcgctgcccaactcctgtcgcaacggcacctgccgcgcctgcgccagccggctgcatgcagggacgatccgctatcggatcgaatggccggggttgagtctggatgagagggaagaggggctgatcttgccgtgtgtggcttgtccggccagtgatgtggtgattgagccggtaagtttggggtaggggtcagtcgaaggtactattcgacacttttgtcgaggtcgggcagccgtgtcaggtcttgcaggaagccgagacgagacttcgccgttcgctcgctcggagaaaacgcgatcaccttcgtaaccggatgacagcgcgatatccatgaggcgtcaagcctgcctcaccccccaacctccagaaaaaatcgcaacgccagcttcaacccatccggccccgccggatcggagaacgcctgcccgcctgccccgccgctccaggcgtgacccaggccctcgatccgcaccaggcgcacgtaaggcgactttccctccgcccagtcgaacacatccatggcacggcgcatgccgcgctggatgcgccgtgccggcgccgcggacaacgcgtgcgcatcctccggctgcaggtgcatccacatgcccgccgcggcggtggcgttgctgaagtcgaccacgtggtcggcatcgccatgcagcaatagcaacggcggcgggcggcgccctgccagtccgaaccgcagcgcctgcatggccttggcatcgggcccgtgccccccgcgcatggcgcgcgctgcctgggcggcattgctggcgctccatggcaccgcgccggagtgcgaccccactgcggcaaagcgtcccggatagcgcagccccagcatcagcgccatcgcgccgcccgcggacagccccagcacgctgatgcggtccgcggcaaccggatggccgcggcaagcctggtcgatcagcgccatcagcagaccggcctcgacaccaccctgcgcgccgggccggaaccagttccagcagcgctgtgcgttggcctgcgaggtctgttcaggcagcaacaccacccagccggcttcgcgcgccacggcggcggcgcgcgtgaccgcggcaaagctggcggcatcctggccgcagccatgcagcagcaccagcatcggggcgcgccgcgacgccgtgacgccggccggcacaaagatgcggtagcggcgcggcgccactggtgcgccccatgcgccttcttcccagcgcccgctgccgcggttctgcggcgcctgcaccggcgataccacgcccgacagtgcgcgctgcgtggcggccgtgactgcagccgattgcttcaccgcgttgcgcacgatggcctcggtcatcggcctggtcaggttctggttgacggcgcgctgcaggcggcgcgcattgcgggccgcggccttgttcagcgtggaccagagttttgcaccggatgagcggggcatgcggcgtcctgtcggctggggtaacccgtacatcatatgcgcaagctcaggccgccttgcatgcaacgcgtgccggatcactgcctacaatgcaagggccgtgtcgccccgagacatggacaggaggcaagcatgagcgatgtgacaaacgagttcaggcctttggatcctggccgcatcaacctgatggatccgcttgaagtgcagtactggtgccgggagctgggctgcagcaccagcgacctggagaacgccgtcgatgccgcgggcgaccatatctccgcggtacgcgcgcaactggagtcgaaccaggccggcgcgcggcctggctgaaatcccgagacaaacggtggcaggcaggcatccccggctgagcggggatgcctgtggagcgtgccacgtgagatgtcggcgccgtgtccgttccatgccggcatgcgcggcacgcaccaatcgcatgcgtgcatgcagtccgtacccttgttaaacgctgtgcagaccggaattcagcaatgccttattcgctggacggtagttttgctgcatgatttccggcccgggcaaaagacccggcactcaagacggggacagcttgacaacaccacgtcggaaaccaaggggttaccaacactaggacgcatcgacaatgaacaccaggctgccgattatcacggtttgcaccgccttgcttgcacctgccgcgtgggccggcaatgacccgcactggagctacaccggaccgaccggtaccagccactgggccgagctcgaccaggactacaagacctgtgcgctgggcaagcaccagtcgcccatcgatatccgcaccagcaaggcccggcctgcggacctgaagccgatcggctttggctacgccgcggcgcccgccaccgtggtcaacaacggccacaccgtacaggtcaacctgcccgcagcggggcagatcgaactcgacggcgtgccctacaagctgctgcagttccacttccatacgcccagcgaagagaagatcaacggcaaggcctatccgctggtcgcgcacctggtgcaccagaatgcagaaggcaagctggcggtggtggcggtgctgttcaagtccgggcgggagaatgcggcgctgaaaccggtcttcgcgagcctgccggccaaggccggagagtcgcgcgaactgacggcgccgctggatgtggcggcgttgctgccggcccggcagtcgtactgggccttcaccggctcgctgaccacgccgccgtgcagcgaggacgtgcgctggcaggtgctgaagaccccggtggaagtgtcgccggcgcagttggccgcattccgtcagctttatccgatgaacgcccgcccggtgcagccgctcaacggccgcacggtgcaggtcagccactagaggacggcgcccgatagaagtaccaatcgggcggcaatgaccgactgtgcgctccctctcccgcttgcgggagaggggagcaagccagcggcagggtcaggacagcccgcgcagcgccagctcgccgcccaacaccagcagcccgcagaagaacagcttgcggaagcgctcggcgctgatccggtggcgcagccactggcccaggaacatgccgccgagcgccggcaccagcgccagcgccgaggcgcccagcaccggcatatgcagcagcgacccgcccatggccaggctcaccgccagcgcaatggtcgataccgtgaacgacagcccgagcgcctgcaccaggctttccttgtccagcccgagtccctgcaggtaaggcacggcgggaatcacgaacacaccggtcaccgccgtaatgccacccgtgaccagcccgatcaacggcccgagccaccgctccgcccctgccggcaccaccagcttcaccgctgccagcccgaccaccgcgtacagcaccagcgccacacccaaggccgaggtcgcgtgcgtcgtcatgccggccggcacccatgccgcgcacagccaggtgccggcgcagatcgccaccagcatcggccacagccgtagcatcagctgcccgaagcgcggcccgccgaacagctgcaccacgttggtcaccatcgacggcgccaccagcagcgccgcggcctgcgcgggcggcatcaccagccccagcatgcccaccgcaaccgtgggcaagcccaggcccaccacccccttgacaaagcctgccagcaagaacgtcaggccgataaaggcggcttgggtggcgattgcttccatcgtcatcgctgctccccctcagcccgccttgtggtcatgcaccgcgcggctgtccgccggcgcctggtcgcgctcgttcagcccgtagtcgcgcagcacctgcgccacgcgcagccggtagccggcaaacacgccgccgcgaccggccgcctgcgcctggcgatgagccagcgtattgcgccaggcgatcaccgcggcctcgtcgcggaagaacgacagcgacagcagcttgttggggttggtcaggctctggaagcgctccaccgagataaagccgtcgatggcctccagctgcgggcgcaggtgcgcggcgatatcgaggtagttgtcctgccggcccggcgcgggctcgacttcgaagatgactgcgatcatgttgtctcctgggggcaatggcgggaatcaaaggaaatgcggaatgcgtgcgttcagcgacggacgatagcggaatgcctgcgccagcgcggccgggtcggccccacgcgcacgcagcgccgccaccgtggcggcagccagcgcctgcgccaggcggtcgccgggacaggcatggcggccgtggccgaaggtccatggccgttcgctggccgcggcaccactgcacgacgccgcggccagcagcaccagcaccgcgtcgccggccttgacggcgtggccgcacagttgcgcatcggcggccaggaagcgccgcgtattctgcaccggcggatcctcccgggcgacccgcgccaccacggcatcgagcggcagccctgactgcgtcgtgtcgcgacccagccgcagcagcgtattcccggccagcgccgcggtggcttcgcaggcttgcaccagcaggccgatgatgttggcggcgaccgcctgcgcgtcgatgccggcggcacgggctgcctgccgcagcgccggcagcggccctgcgccgtccgccgcatcggcaagccagtgccccagccattgagcggcctcggcgcctgcgcgcacggccggtgcatcggccaatggcgactgcgcgccggcgaaggccgcaacccgttgtgcggcttcggccgcgctgctgccttcgttggcaaccggcaggccaagcaggtcggcgaccgtgacgaccggcagcgtgaacagccagcgattgatgcactcgccggacatggcggcccaggacgcttcgccggcatcgagcaccgccgccagcaccgttgcgcgctgcgccgcggcggccgggtcgatacccgccagcatcggcatcagcagggccttgagcggcgcgtgcgcggcgccgtcgttcatccggaccaaccggccgaacagctcgccggcggcggtgccggccagcgcgggcggcaccggctgtgcgggcggccgcacgcggcagtcggagtgggcaagcacgtcggccacttcctgcgggccggcggcaacccacaggccaaggcggtcatcgcggaagaatggctggctggcggccagctcccggtagtacgggtacgggtcgggatgggtgacggcgctgagcggatcgatatcggtatcgggcatggcggcacagtggatggaagtgctgagtccttgcagcgaacccagcgcccgggggcgggcggacagtcacatcatgccgccgcggcgcaggccgaaggttcatggtgacatgaactatcgaatgaagtgacgcaacgccgccacaccctgggacttcacgcatccattcgcgccagctccccttccccttgcgccgcttccgtcgccggctcgtcgttccggtgcgccagccggtacagcaccggcaacaccagcaaggtcagcgccgtcgacgacaggatgccgccgatgacgaccgtcgccagcggacgctgcacctcggcacccgtgcccgtggccagggccatcggcacgaaaccaagcgacgcaaccagcgcggtcatcagcaccggcctcagccgcgtcaacgccccatcgcggatcgccgcatccagcccatggccttcctcgcgcagcgagcggataaacgacagcatcaccagcccgttgagcaccgccacgccgcacagcgcgataaagcccaccgccgccgagatcgacagcggaatgccgcgcagccatagcgccaggatgccgccggtcagcgcgaacgggatgccggtgaagaccagcaggccgtccttgacgttgccgaacatggcgaacagcagcacgaacaccagccccagcgccaacggcaccaccacgcgcagccgcgcggtggcggactgcagctgctcgaaggtgccgccccagctggtccagtagcccgccgggatctgcacgcgcgcgcggatggcggcctcggcctcgggcacgaagctgccgatatcgcgcccgcgcacattggcgctgaccacgatgcggcgcttgccgttctcgcgcgagacctggttggggcccggtgcgatatccacgctggcgacttcgctcagagggatatagctggtgcgcgctgcggcttccttcggcagcggcaccggcaggcgccgcagcgcttccacgtcctcgcgcacggcatcgggcaggcgcaccacgatgtcgaagcgccggtcgccgctgaagaaggtgccagacaccttgccaccgatgccgatcgccaccgcatcctggatatcgctcaggttcaggccatagcgcgccgccttgttgcggtcgatctggactgtcagcatcggcaggccggtggtctgttcgaccctcacctcggccgcgccggggatgccctgcagcaccgccgcgatgcgattggcggtctgctccagcacggcgttgtcgtcgccgaacaccttgaccgccacgtcggagcgcacgcccgagatcagctcgttaaagcgcagctggatcggttgcgagaattcatagttgttgcccggcagcttgcccacctcatcgcggatcgcggcgatcagctggtcgcgcgtgcggcgcggctcgggccattgcgacatgggcttgagcatgatgtagccgtcggagatattcggcggcatcgggtcggaggcgatctccgcggtgccggtgcgcgcaaagatgcgctcgatctccgggaacctggccttcagcgcggtttccacctgctgctgcatcgccacggattgcgtcaggctggtgccggggatgcgcaaggcctggatcgccaggtcgccttcattcaggctgggcacgaactcgctgcccagccgcgtggcaatggccaggcacaatgccaccgccacgccggcaaacgtcagcaccactggcgtcgcggccagcgagcgctccagcagcaccgcgtagcggcggcgtgcccaggccatcagccggttctcgcgctcagccacgcggttgccgataaactgcgccaccgcggccggcacgaaggtcaccgacagcaccatcgcgcccagcaacgccagcaccacggtgaaggccatcgggtggaacatcttgccctcaaccccggtcagcgcaaagatcggcaggtacaccaccatgatgatcagctggccgtacagcagcggccggcgcgcctcgcgcgccgcggcaaagacttcatgcaggcgttcgctgcgcgtgaggggatggccgtggcgctcctgcgcatgcgccagccggcgcacgcagttctcgacgatcaccaccgcgccgtcgacgatgatgccgaagtccagcgcgcccaggctcatcaggttggcgctgatgcggtagtgcaccatgcccgtgaaggtgaacagcatcgacagcgggatcaccagcgcggtgatcagcgccgcgcgcaggttgcccaggaacaggaacaggatggcgatcaccagcaccgcgccttccagcaggttcttcttgaccgtggcaatggccttgtcgaccagcgtggtgcggtcgtacaccgtgaccgcctgcacgcccttggacagcgtgcggttgatctcggccatcttgcggtccaccgcctgcgagaccgtgcggctgttctcgccgatcagcatgaacacggtgcccagcaccacctcgcggccgttctcggtggccgcgccggtgcgcagctcgccgccggtctgcacggtggccacgtcacgcacgcggatcggcaggccctgcgcggtgccgacgatcacgtcgcggatatcctcaagcgagcgcacctgccccggcacgcgcaccaggtactgctcgccgcggcgctcgatatagccggcgccgacgttgtcgttgttcttctccagcgcgctcaccacgtcggccagcgacaacccgtacgacgccatgcgctccaggctgggcgcgaccacataggcgcgtgcatggccgccgatggcattgacctcggtcacgccgggcacgttgcgcagctgcgggcggatcacccagtcctggatctcgcgcaggtccgacagcgtatacggcgtgccgtccggcttgcgcgcaccggggtcggcctcgaccgtccacaggtagatctcgcccagcccggtcgagatcggccccatcgcaggcgtgatgccggcgggcagcttgtcgcgcgcttcctggatgcgctggttgaccagctggcgcgcaaagtggataccggtgccgtcgcggaagatcaccgtcacctgcgacagcccgtagcgcgacagcgagcgggtctgctccagcccgggcaggcccgccatcgcggtctcgaccggataggtgatgcgctgctcggtctccagcggcgaatagcccggcgcggcggtgttgatctgcacctgcacgttggtgatatcgggcaccgcgtcgatcggcagccgggtgtagctgtacaggcccagcgcggccatgcccagcactgccagcaggaccagccagcgttgctcgatggcaaagcggatcaggcgttcaaacatgcgtgcctcccgctcagtgctcatgcccggcgctggctttgcccagctcggacttgaggatgaagctgttggccgcggcgtagcccgcgccggcctgcaggccctctgtcacctccaccagcttgccgccagcgcgcccggtcttgaccggctgcaccgcaaacccgcccggcacggtgatgaacaccacgctctggccgtcgacctgctgcaccgcgtcggccgtcaccgtcaccgtcaccggcacctgcgccggcgcgcccagcacactgaccgtgacgaacaaccccgggcgccacgccatgccgggattggccagcgtcacgcgcgccttggccgtgcgcgtctgctcgcccagcagcgcgccgacgtaggacaccttgccctcggcctgcgtgtccgaggcgctcgagcgcaccgtgaccgcttcgcccacacgcacctggtgcaggtcgcgcgcggacaccacgaactccgcccacaccgagctcaggtcggagaccgtgaagacgctggtggcttcctggaccgcttcgcccagcgccaggtgcttctcgaccacgatgccgtcgaacggggcacgcagcgcaaactggttcaggctgccgcccttgcccgcgctgttctccgtggcgccaatcgcggtcagcttctggcgcgcgttctgcaccgcgatctgcgcttcctcaagcgccgtgcgggcctgctggtaatcctgctcggcggagatcttctcctgccacagcgtcttctcgcgcgcataggtggcacgcgccagcccctcgcgcttctgcgccgccagcagctcgctgcgctgctcggccagcgtcgtgctggcgagcagcgccagcacttcgcccttgcgcacctgctggccaaggttagccggcaccgcctgcgccacgcccgccacgcgcggcaccacgtgcgcggtgcggtcttcattgaagcggatctcgccggggaaatcgacgctgctgcgcagcggcgccgcggcggcggtggcgatgccgatgccggcctgctggatctgcgcgggcgtcagcgcgatcaggtgcggcttgccttcggcttccggcttcgccgcgggagcgctggcgtcagcgtgcgcggccgcattgtctccttcgttgccatgttcgtgctcgtcgccatgctcggcttgcccgtgcccggcctcgccggtggcgctgccgcccttgccggtggacaggatcgccgcgccgcccagcagccccgcgaccaggatggccaccacggcggcccgttgttgcttgctcattgccatgtctgcagcttccgtatcagtgtccgaggatgcggtcgatgctggccgccgcgtcataggtgcgggccagcacgtccaggtagcgaatgcgcgcccggaacagcgtgcgctgggcatccagcacatcgaggaaattgaatttgccggcctcgaacccgcgcgaggcggcggcataggcctgctccgccgcgggcagcaccgaggcctgcagcgtctgcgccgcggcgcgcgataccgacagctgcgtcgacgcctgctgcagctcacccgccaggcggatgcgcgtggccgcgtgcgtgtcctgagccttgtcggcccggcgcaatgcggcgtagaggttgccctggttgcggtcaaacagcggcagcgggatcgccacgcccagcacggccataccgcggttggcctcgttgtcgcgcttggcgcccaggctcacggtcacgtcggggtactggcggctgcgcgccacggcgacttcagcgcggctgcgctcggccacgaggcggcttgccgccagctgcggcgagtcttccagcgccgcttgcagcgctgccggcgcggggcgcgagggcagtgcgtcaaggtcaccctgcgcctgcgcaaagtgcggtacggcattgccccacagcgcggccagcgactgccgtgcggattgcagcgcgccggtggcctcggccagttccagctcggcattggcctgctcgaccctcgcgcgcgtttcttccagcggcgcgaccttgccggcggccacgcgccgcccggccgccgcggccgccttgctggcgatgccgaccgagccttcggcgagcttgacgcgctcctgcgccaccagcacgccaaagaagcgtgcgatcaccgcggcgcgcagctcggcgcgagcgccgcccagctcggcctgtgccagttcgcgcccgcgctcggccacgccgatgcgcgcggcgcgcttgccgccgagttcgatcggcaggttgatctggccggtggtggagcgcgtggccttgcgcgtgtcttccatcgacacggccagttcgggattgggcagcacgcgcgcctgcgtgacatcgccctcggtggcgtcaagctccttgcccgccgcggacaacgtgaagctgccggcttcggccagcgccagcgcggcgtcgagcgtcagcgtgccggcaggctcttgccccggcgccggcgaggatgccgatggctgcgccatggcagggggcggcgtctgcgcgacgccatggatcgggctggagagaacggccgccagcccaagcggcagcaaaagtcttcgcatcgaattgcaccaggaaagaaaccgggagaattcggcgagacgcctgacgtcaggaaatcagggagatcaggaaagcgtggaagcgtcgtctcgccggctaggcaagacgcggccactgcggacggtcgggcgcccgcgcactgtgcgaagagaagctgggctgcggcgccggtggcaccagttccacccggcgcatggcgtgcacgtcgggcgcgtcggcccgtgcaaacggcagcgaagcgatatggcagacgccgcagtcgggatcgggcaggccgagcttggccttgtcctgcgccctctgcgcgggctggtcctgcttgccgctgtcggccttgtgctggtgctcgtggtgcccgaaatgggccttggccgaagccgccacctcatgccggcaatacgcagcggctcccgcccaggcgaactggagcggcaggacgagcgcaagaaggatgaggatgagccgttgcataggggaagtggcagctgccctggccgccgagcatcaggcgccggggaagtgcagcgagccgcaagtttaaccgagccgcaccgggcattccggcgacggggtcattacatttgcgtcatgccacgggtcatttccgccctcgcccattaattcaatttttttgaataacttgtccggcaactgacctgcttccgtatcgatggcgctcctatagttctgtacatgaacggcacgcacacaacgcaaagccttctgacaaattcaacgagcttaaggagaaccatcatgaccaagaccacccgcctcgctaccgccctgctcctgtcgctggccgccctgggcgccgcgcaagccgccaccgccgccgaacaagtgcccggcgacaagtacggctacagcttccgcagcaccgtgcccggcgacaagtatggttatgagttccgcagccatgatgtgttcacggaaggcgcccgcgtcggcaaggccgatccgtttgtcgacggcgcacgcacgctggccgggctggaccgcagcggcgtgtcggccgccccagcgcgcagcttcgacacctattccgaaggtagccgtgccggcaagttcgatccctatggggaaggcgcgcgcgcctgagcgataccggcacccggccagcaagaaggccagcgaatccgctggccttttgtcattcgtcgcgccccagcctgtgcatggcctcgcgcagggtccgcatctgggcgctgaagctggtgcaggcgtcgcagatcgccaggtgggagcgcatgcgcagccgctcgccccatgacagcggccggtccaggcccttcatggtgaggtggtggatctcttcgcagttcggcagcaggcggcgggaagggcgggaatctggcatgttgctcagtggcttatccgttgcatgggcggggggccgggatcaaccggccttgccgggccggccgcgctggccgaaccagtgcagttccaggcattcgcgcaggcgcatgcgggcgcggtacagcatcgcccaggcattggtcgcgctgatctgcaaatgctgacagatttcttcggtgtccagctccagccactcgcgcatcatgaagatccggccggtgcgctccggcaggcggtcaacgcacagctgcaggatctcgaagaactcgcggcgctcaaaggcgcgttccgggttgccccagtcggatggcgggtcctggtagtggccgttgcgcgtgaacagcgcgtcgaaggcatcgtcgtcggattgccgctggccttcggcatcggtggccagcgccagcctgacctcacgcttgccgctgcgcagggtgtcgatgatcttgtgcttgaggataccaaccaggtaggtgcgcagcgttgactggccggcgaagcgctcagggtgctccagcgccgccagcagtgtttccgagacggcatcctcggccagtgcctggtcgcgcagctgcaggcgggcaaagcgcagcaggtaggggcgtatggcctggagttcggcggggtcgagactcatcggggatcggggcgcggttgcctggacggatggcccatgatacccgcgccttacccgatcccgtgggattgcccgccgaccgcgcgtcagcgcccgccggcgatacgcatcggtcggccattggggtctctcaggaattcgttcgcggtatagcgatgctcctgcttttcgcccatgacgaatacatacaggttgacgctcgcccaactgcaggcgagcccttcgctggcaagcacgctgaggcagttgtgcaggttttcccgcgtgggcttgtagtggccgctgttgttgtcgatcacgcgcagcgagccattcctgatggtcagcgtacctgcgcaaataacatcattgcccgcgttgaacgacgagtggttgaagaacatggcgtcatccagcggatctgcatctttaatgaacaaggagccgtacttgtccatcgcataggctgtcaccttgaccgcatgtgtcgtgatgcgctggttatttacgtcgtacagaagtccgtcgtctccgacgatcgccatataccgcatgcgttcgctctttgtcagatagttgacatcgcctgtgacaaggttctcccgaccgatggcatcgagcagctgaaaatcctccagcgtcagtgcgtgcacatctttgctggcaatcgcctcggcctctgcgcgccgttgcgggttggccggcatcatctgcgagagattcttgtgcgtcagatggacaccgctgcccgagatcgcctggaccttgcccgactggagataggacagacgctcgttctgatagtccgcgcccatcggcctgagttcgcgcacgtagggcgagcggtcaccgtggttgacaccggaaccgagcaccagcagcttgcgccggtcgaatttcatccgcccgcgcaagtccggggtgagaatacccagctgggtcaggcgcgcatagagttcctgcaacgcttcgctgccgagattcgtgattgcacgacggcgcgtgacgaacagagcattgatcttttcagcgccgccaaccaagccctgacggctttccggcttgccgcgcttgagcttcagccagccgatgcacgccgtcacgatcgcgttcaggctggcgatctcccgccgtgcgtcccgtgcgccgttcatctctcgccaatagtcttccagcgcgcaatcgaccgcgcggatattgctgccacgtgccaggaacttccagtccctggcggtggcggcgatgaacgtctggtattgggtcctcagcatgttccagctccccttgtccacttgatgtcagaaaatgcccgggctcggatgccgtgccagctagttgtccagcagcgccagataccgcccgatatccccgtcctcacgcaggatgtcctgcatcagatccgccagtggcatctgcccccagcgcaccgcgcgccgcagcaggtatggcgtggggctgtgcggctcatggcgcgccaggtagtcggccacatcccggatcagctggtaggcatgcgcacggtcctcgatgcggccgtgcgccagcatggcggtctgccccggccccgcggcgggcaagaccggcatcggctcgggatcgtccacgggatcgttgttaccggccggccccgtggcggcgggttcgccacggtgagcgctgcctgcttcgtccccgcgcagcgccgccaccgcccgcaccagccgcgccagcgtgtcggttacgcgcgccaggctcggcgcttgcgcccccagcagcgcgtcgatgcgccggtcaaacccagcccattcggcgctggcgccgtgcaggtcgcgccacaacgcatccaatcgggcccggtcgggcgcgtgatgcgcgcgctgcagcagcgcctcgcggcccaggctgtcgtagtcatcgaccggcgccaggctgcgttcccacaggtccagcgtgatgtgcaggggtttctcgtcggccagcgacaacagcgggacatgcagcgccagcaccgctggcaaggtctcgttgagccatgcgatcggggcgcagcgtgcctccgcatcgccggcttccatgcgcggccaggcgctttcccaatacgcgtccgccaacgcccccagcaagcgcaccccggcgcaaaagccggccgcgccgtgcagatggatccacgcctcgcacagccatgccgccagctggaagtccttgctgcgcgtggccagcgcctcgctggcgagcgcggccacgcgtttccagtcagccttgaccagcgggcgctcccattcccgcatcggcaaggactcgtcgtcgtgctggcgcgcttcggcgatggcgcgatagaccgcgtcgtagcgcagcgaagcgcccgcgggatcgtcgcccggcaccggcgcaagcagtgcctgcgcgtccgggatgcggtcttgcgttggcgtcgtcataggttggtccattcaggagcccgggtgggaaagctttgcggccacggcagcggcatcttcctgcccgcggccgtcagcaccagacgcaggaacacacggccgcgcaccggcctgggcgccgccgtgaaatccggcgcggcgctgcccagcggaaagtcgaagcgcagcagttgcgccgtgctgtcggcgcgcccgcccggatccgcgatgcgatggcgcgcaatgaacgacagcagcgaccacgggtcggcaaagcgccaggtcatggtcttgccgtcggcggccagcgcgcgctgttcggcgtcaggcaacgcgaccatcggtgagtccttggcaaagcgcagcgtcagcgtcaccggactgccgtagtcccagtgcagcgagcgcggcgcatcgcgcatcgacaggctctgcgcgccgatcgtcagggtccagtcgatgatctggttgccggccagttccgcgccgcggttgacgcggaactccgcgctcacgtcatagcccgcgggcgcgccctcctcgaccggatacagtggcgcgagcagggtcctgacctggtcgaagctgtcgatgaactggtgcaccggcacgccggacgcgatattcctgagcggcccgtcgccacgcgcggcccggtacgtcgccgagagcggttcatagcgcttgagcacccggccaagctcggcatagtccgccgtgcgcacctcgccggcgttggcggcgccgccaaacggcgcgcgcccggccagccgttcattgaacgtggccgagaacccgtcccactgccgctgcaggtcggcaaaatagccttgcgcacagcgcgcgagcaggccgtcgtacaggcgcacgtgcagcgcggcaaagtagtcatccccgccggcaggccgcgccgcaaagcgcgccaggcacacgccctggccggactcggccgccgcggcctgcacgaactgctccagcatcagcagccggctgttcgggttcttgagccgatagcgttccagatcgcggttcagcgcctgccagcgcaatgccaggccggagccggcgtcggcgggcgagagcgcggcaagatacaccgcggcctcgcggcccagggcctgcgcacgcgccgactgctggtccaggtacggccccagcgccgccgcgtcgttcagcccgaacgccgtcagcagcggcgagcgcggcgcacgggccccgtcgccggcgctgccctgccggatcgcgtacagctcggactgctgcagcagctcgtccaccgcgcgcagccgtgccagcgcatcgcgcgaaaccagcgcatcgaggtcatccacgcgcgacatggcatgcatctcgcccagcatggtcttgatgcgcgcgattcggcccagtgcagcctcgaagccggcgctgccgccatcggcctgcagcggcgccatgattgccgcggtcgcgacctggtcggtcaccagccgcgcaaactgctggtccacgctttgcgcaatcgcatcgcgccaggggcctggcaggcccgtcagcccctcgtcaagaaagcgcttgcgcatgtcgcccagggcgatggcctggtcaagctgctggcgatcccacagcaccgccgacccggccggcaccgacggcagcgccaggtcgcgcggcggcgccatgaacggctggttcagcagggcggcgagccggtcgcgcaaggccagccgctcgggcgtgaccacgaagcggccgtccttgtcctgccacgcgatcccgctgtcgggtccgctgaagcgctgcgccagctcgccggtgaaggcctggaagccgctttcagcgcgtgcgcgcgcggctgccaccaggtcttcgccgagcagccggttctgcgcggcctgcgccagcgtgcgcgcgtagacggtgcccgcggcgaactggggctgcctgatccagccgcccttgccggacgccagcagttcctgctgcgtgccgatcgccgcgacaatgccgcggtagtcggccaggacccggttgacgccactgccggcattggccccgccggccagttcatcgaggctggacctgacggcgcgctcggccaccagcagcgggttgttgttgaaaagccgctcgtcgagctggcgcgcgcccttgtcgaaggtgcagcgcaagggcggcaccagcgcggtcagtgccctgccgccggttgccaggcttgcggcaccacgccccttgccagggtcgcgctggaaatacggcaggctgcccgagacctcgccctgcaactccgcccccagcgcatagcgcaccaccagccgcagcgcatcggcgttggcaggctgcggcgtttccagccggtgcagcgcttgcagcgcagcgtcgaactggtcgaccgcggcaacgtactgctgcagcgcgcgcatctccggcatgtcttccagcgccaggctgcgtggcggcagggcctcgccccgtgcgcccggcggcgccaggcagctgtcgccgatgatcagctggccggtgctcgggtcgcgccccacgcctgtcagcgtgtcgacgcgtgccagcagttcgcgatcgatggtgtcgagcgcgatctcgccgaaggcgcgctggaagcgatcgtgcacgcgcccgtccaggtcgtcgataaaggcccacgagcccggcatgaaccaggacgagaccgactgcgcgctcaggcgctggttcatcgcgatcagccccagcgcctggcgccggtaccagtccggcggcaggtcctggccgcgctgcgcggccagcgcgcgctgctgcgcgccggcacgcagttcgccaagcgcggccagcagttcggcatggcgatgtcccatctgccatgccgcgaccagcagtcccccggcccacgcgcacagcacggccatgccgccccagcgcagcgctcggtgcaccagcggccgcgccagctgctgcgagcgcgatggccgcgtcagcccgtactccaggaagatcttcttctcgaacaggtcgcgcaggaacgccggttgccgcatcagctcgttgagcaggtcggcggacgagctggcgctggctgccggcgccagctccggcgcgtgcgcatcctctggcgccagtgcgtcaggctgcgccgcacgcaggcgcggcgcggcgaaggcgggtgcatgcgccgccagctcgccgctgtcgccggtcaggtagacgccgcgcagatagaagggctcgtgataggcgctgggccgcagcagttcgtcgacatagcgcgtgagctgcccgcgcatggcttcgatgcgcgccggcagcagcagcgactggcaggcatccacctcctgcgcccctatcgccagcagctcggccacaccgtccgacaccgcgcgcaccacgcccgacatggccgcatcgatccagcccgactggtaggtggccgacaggtcgtacggcgaggaccagcccagcatgccggcgcgcatcggctctggcagcgcgcgcgcaaagtgcgcgaagcccggcagcgactcacagcccgtcaccaccacatagaccgcgaaacgcaccgcaaagcggttctgcgccagccatagccgccggtgggccagcttggcccggcgcaccagctcaagctgtgcgtcggtgtcgtcggccagcagcatcgccgccggcaccgtcaccaccacgctgtcgaagggccgttgcgggcgatagccgcggcacaggccgaggaactcgtcccagggcttttcatcggtatcgtcgtcaggcgagcccagataggccgcattgatgtcgatgaccacgccgcggtcaaagaagtgccatgaaataccctgcgtggcggccgcattggcagcgtcggagcccagcacgctggccacgccggactgagcgatcggcagcggccgcgcatcctcgccctcattcaggaccaggatccacggaatgttgtagcgctcggcgcgcgaggcgatattgccctcgaccagctcgatcgcctggcggaacgcggtgcgcagcgaatcggtgcgcaggcgcacgatcttgcgctcggccgccggcttggcgcgggcccgctgcgcagcgaaatacagcaccgcgccgagcacggccagcgccaccagcgtcagcacgccgatcgaaatcagaaacaggttgctggtcagcatgcgcctgccccccgggcgcggatgggctgccggcgcgtcatggcgtgcctccggccacggtgtcggcccgcagcgcttcgcgcaccggccaggattgccacagccacgtcacctcggacagcgccagcagggtggccaggcccagcaggaacaccacggtccagcgcgtcagcgtgggcagcttgcgcggcgcgatatgcgagagcgtgtgggcgtacgcggattcgctgagcacgcgctcgcgtccgcccaggtctggccggcgttggtagatgaactcatacagttcctcgcgcagactgcgcagccgcgcttcggcatcggcgccgcgaaagcgcccctggaaaccaagcccgagcgtgaacaggtacagccgtgccaggttgcggcgcgacggctcgcggtccagcagcagctgctcgatacggcgaaacacctggtcgcctgccacgttggtgcggaacagcgtcgattcgagcagatgcccatgccacgcggcgcggccggcccaatcggcgttcagcaggatttcatcggcgagcaccgccttcaggtagcgggcatcggccacgtcctccatctcgaagcgcgagctgtcgcgccgcgattgcagggtctgcacttccagcaggttcagcagctggcggttcatgccttgcgcggcagcttcgccgctgaggtcgggttgttcggagaaccgctcctgcagcttgacgagttcatccaggaacgcccggaactgcccggtggcaagatcgtcttcctcggtttccggtcggtagcgcgccatagtctgtttgccttgatagtctgccgtcagcccttgacgaacagcagcatttcctgcggccgctgcacgctggcgccttcattgggattgccgatcaccatcgcctcgttggcatggaccagcgcgggatcggcttcgatctcgaacaacaggtaacccgagccggaacgcaccccaaggtcctcggcatgctcgaccacacggcgcaccgcgcccagcacgcgccgcgtgcgcagcgacgggtagaccgactgcgagcccaccacagcgcccgacatccaggccagcaggtcgcgctctgactgcccgcgcaggcccaccaccaggcgctcgccgatccagtccggctgcagcacgatgtcgaacgcgccgtggcggaactcgaacttgtgctcgcggtactcttcgctgacctcggccagggtctcgcgcagcgcgcgcagcagcggcgtgaacacggccatggggtcggcgtgttcatagtcgtccggcaccggcggcaggccgcccggcttgagcaggctgagcgaccccagcaccgaggccagcgccaggtagagtgcaagcgggtgcagatgcggcgtgcgcaacaccgcctccagcagcggcagcgcggtcaccaggctgcgcaagcggtccttcagttccagctgggtcaggcggtcgtccgcccgggatgacgggatcgcggtctgcttggccacgaacgcggccttgccgcgcagctgggccaccagcgacgccaccgccgtccacagcgcgctgccgcgtgccacctccagcaacggcggcaggcggtcgccgagccgcacgatctcgttgtccttgtagaccgcgcccaggcacagcgacacatggagcggcgacggcctggcgccggcatcgagtgccaggcttggcagcaggcgcggaatgtcggcgggcggcgcttcggacacctcatcctccaccggggcgcccgccaccgagcggaaccgccgcacctgcccgtccttgcggtttgcggccgccaccggcagggtcaggtaaagcgccagcatgccgccggcaagcgcgtcggcaaacggctcgagcgccagctccagcggcggctggcgggcatcgtcgcgcgcgtaggacacggcagtgccgtccggcatgatggcttcgagctgcagcacgcgcaccacgcccgccggcagcagcccggcgtcgaactccagccggcgcacgccccagccaaacggtgcggccgcgagtgtctgccacgccaccagcgaatcgagccgcccggccagcagctggagatgctggggcgccagcagcatgccctcatgccattcaacccgatcgaccggcagcgcgcgctcagacatggggggctcccgggccgtacgcggccgtggcaggaaaaaccaggttcatttggtcacaagcacggtaaaggcggcgctgtcgagctgcacggcaagcgtgccgttgaattgctcgacgcgggcgcgatgcgcgcccggcgcctggtagttggcgaacacataggccgcggcgacgcgcggcccctccaggtcttcggccggcacgtccagccgctggccgggcaccagttcccagctgcgataacgcagcccgctcggataggtgctgcccaggtcgctgcgcccggcaaaccacttggccgcgggcaggtccgccagccgggcctgcagggcctcgtcgctgaccagcaccacgtcgacggccaccgggctgttgccgttggcatccgccgccgccgtcagcgtgacttgcttccatttgaccttgtcccccttgaagcccagccatgaagaggccgcgcagcccccgagcaggccagcgagcgcagccgccgccagcagcgtgccggcgcggcgcagggataagagatgcacgggcgtcgtcatcatcagactccttcgtggttgcggatgcggcatcatttcgcacccaccccgatgcccatcagcacgatcagcagaccggccagcagcgcgcaggcgctggccagcgccagttgcgcgcgcgtcagcaccagccgcaccgccgcggcctgtgcggcgggcagccgtgggcccggcacgtgcgcgcgcccatccgcgccctccatccgctgcgccgcgacgcgttccatcggcaggcccaccgacaccagcgcaatcaccgcgcaggtgcagaccaggctcaaggcattgcgcggcccatcgcagatcgggtcgatcgccagcagcagcactgcggctgcctcagccggcaactgcagcaccgacagcgcaacgcccgcataggcgatcgttcccaggccgccctgccccgccgagagccaggccgcgatggtggcggccatcgcgatccatgccacgtcgccggcgcccacggggcgcccgtacaggttggcgacgaacaccgtggccagcgcgaagtacagcgccgagcccccgcgcacgaacaccgcgcccaggggcaccaccagctccaccagcccgcgcggaaaacccagccgcgcgctcatggcctcgattgtgtgcgggatcggcgcggtggcgctgcctgaggccaggccgaccagcatggagccattcagctcggtcaccacctgcgagaacggcagccgcgcgcaggcggcaatcgcggccgcggccacgccgctgagcagcaggcagagcatcaggaacgtgaccagcaccccggccatcgcgcccatggtggcgcggtcggcatgcatcgacagatgggccgcaagcccgaatgccagcaccgggatcagcaagttggcgtgggcgatgatctgctcgaaggtgcggtagatcccttcgaacacattgctcagcatgccggtctgctcgcgcgacagcgctgcgaaggcaagcccgaacagcagcgccccggtgagcacgcccagcgtctggccatgcgccagtgcgcggtagaagttgtcgggaatgatgttcccgagcgcgtgcggcagcttgtccgtattggcctctgccttgccatgcaggtccacgcgcacctcgccgccatcggccacgccgctgaggatcagcgcgccaagcttttcgctggcctgtgcagggagttccgcgcccggcgcggtcagcagccccgccagcgcgccggccagcgcgcacacccccaccaccccggcagccgtgccgaagatggcgccgaaacgcgccccggcgcgcggcagcgccagcacctggcgcaggccgaagaaggtggccaccaccagcagcggcaccgcggccatgttcaccaccgacaggtagagctgtccgaccagccaggcgaagcggcccagcggcccggccacggtgccggcgagcgcgcccgccaccaggcacaagagcagcccgggcacgctgtgcgagagccagttcagggctttcatgcggccttgttccagccgcgcgccagcgcgaacgccaccgtcgcccgtgccagctcgttggtgctgtcgaccagcatgagcggcggcgcggccaggccgcgcgccgccaccgggatttccgtgcagcccatgatcgcggcgccgacgccgagcgccgcgatccgcgccagcgcgctgccaagcgcctcgccggcctggtccagggcgccggccttgaccgcccggatgcaggcatcgacctgcagctgcaccggctccggcggcaccaccgccgcgatcccgcgcgcgtcgagcgctgcctggtagatgccggaggccagcgcaccgcgcgtggccaggatggccacgctgccggtatcggcaggcaaggccgccacgcagatccgcgcgatatgcaggatcggcgccgcgctgtgcgcgctcagttgcgcataccagtggtgcgaggtattgcacgggatcaccaccagccccacctggttgcggttgagcagctcgatgccgcgcagcaggtagggcagcggcaaggcatcgccagccaggatcgagcgcgagcggtcaggagtctgcggcaggtgcgccaccaccatcggcaggtggtcctggtcacgcacggcatcggtaagccgaaccacgcgatcgagaaaatccactgtcgccagcggccccatgccgcccagcaccccgatcatggtcatgccagtacttccgttgttcatatgagccgaccctaaagcttcagcggccgcgggcagatcaccgacaccgccgcggtattgccgaccaccaggatcagcgtgcgcagcatgtcgcagaccgggtcgacggcaaggaagagaatgaatgcggcctcgaatggcaggccaagataggcacaggtcatgccgaccagcgaaacgatcaccaggcccgtcatgccggccgaagcaaagcccgccagcaccgaggccagcagcaccgtggcgatatcgaccaggcccagcggatggccgtacagctgcgcgatgaacagcgtggcgcagacgtaatagaccatcggccccacgcgcagcagcgagatcgccagcggcaccagcagttccacgcgcacccgggcaaagccgagccggtcgaccaggcactcgatcatgctgggcatgcaggccgcgctgttgcgcgtggccagcgccagcgcaaatggtgagcgcagcgcgtccagcgtggcgcccaggctctggctggagcgcttccagatgatcccgacggccagtgccagcagcagcaccgacgcgatagagaacgccagcacgaactgcatcatcgcctgcagcggctccagtccggacttgcccagctgcgccgcgctcatgcagaacaggatcacgggcagcggatagctgagccagtgcatcagcttctggcaggcgtggtagaccgtttccagcgacaggctcagcccgatggaaatgcgctcgggcacgcgccccacggccaggccgaacatcagcgcgaacaccagggccttgagggcgtcgccgttggcgagcgcggcaaagatattggtcgggatcaggctggtcaggacttcggacaggctcagcgacttctcctggatatcctcgccgtagaggttcatcaccgtatcgctggacgtggcatcgctgcccaccatcgcgccgaaggtctccatggtggcgctcgacaggttgctgcccgggcgcatcacgatcagcaccagtgccgacaccagcgccaccaacagcgacgcgccgacaaacaccgtcaccacgcggatcatcagccgcgaggccccaccatcgcggaacagccgctgcaggctgaagatcaccgccgacaccatgaacggcagcgtggtcatcttgagcaggtccacgtagacatcgcccaccacgcccaggtgccgggccagcgcgggccagagcagcccggtggcgccgcccagcgccaggctgccgatcaccacccacggattgagggcaatggcgtagagcttgccggcatccagcttcatggacgcggcgcgctgtgcctgggccgcgcccggcttcatggcgggcgcgctcatcgcgtggccgcctgcagcacgtccgccacctcgagccgcttgggccgctcggcgaggaactggttgacaaagcccagcagcgccggcgccgacacgttgacggcgatgcccagcgtgtcctcaagatcctgcagcgtcaccacgcgcaggcgcagcgcagcggtcggatccgccttgagcacgcgcttgacctcgaactcgtcgcggtacaccgcggcgacgcggccgtcgttcagcgccttcagggcttcatcccaggttggataagccgtgacgtaggccttgggaaaattgttcaccacatactccgagtacgacgaatttccgaccacgccaatcgagctgtcataggcgcggatcacctccggcaccggccggccgcgtgccatctgagcgaacttgacgcgattgagcagcagcgcgcggttcagccgcaggtaaggtgtgctgaagctgatgatctgcatgcgcggcagcgtgcgcgacagcttgctgatggccacgtcggcctgtccctgcgccagcagcttgaccaccccgtcgaaggtggtggcgtcgcggttgaagcgcacccgcacgttgagcttgcgcgcaagctcgcgcgcgaggtcgatatcgagcccgctcagctcgccgttgcgctcctggaagaacgggggctggtccaccttcagcaccgcgaccaccagttcgccgcggctggcgatgcgggcgaactccggcgccatcaggcgtccgtcaggcatcaacaccagtccgttcggtgtggagactggcgcaggggcgccttccggcaacccgccctgcgcggcaaacgatgccgccgggtgggccggtgccggcgtgtaggtggcctgcgcatggccagcggccggcagggcaagcgcggcgcccgcgagggcgcgcgccagccagcgccacgcgcgtgttgccgcgcggcgggaatcagggacgggagtcagcgacatggcgtcaaacggttcatgtttcagggagtcgagggcgcgcctggagccgcggcaaggccaacggcaatggcgggcgcctgggtggcggcgggcagcgtggcagtggccggggccgcgggcgccacggccatgggtgcggtgtccgcacgctggagtacgccaggccgtcccaggcgggcgccgatctccacgcccatcaggaacaacagcgcacacagcagcaccgcgcaggtcacggcgattgtcaccatgcgcgagctcatcgagaatacgtaggtcatgcttgcctcggcggtcatcagggggtcatcacggtggcctgcgccggcgcgacgatctggatcacgccgccccatgcgcacatcagtttcgagctgtcctgcagcgccggcgcgccgccgatctgcacggtcggcgcgcccggcagccacggcgccgacgtcgccggcacgcagggcatcggtgtcagcacgccctgcgccgcggcggtggccgcggccacctgcgggttgcccaggcagttgcacatgccgaagggcgggatgttcaccatcggcaggtggtccatcacgctggccgcaccggtgccggccagcacgcggcccagcggcagcacgaccaggctggacggcgccagcccgaagctgcactgcatggtcgcgcccatggtgacctgcaaggccatggctaacccctcagccagcgttcgagacgctgtgcaaagccggcgggcactgccgcgccctcctcgccatcggcgggtgcgatcgcctgccagtcgccgcggggattgccgtcggcgtagctgcgcacggcgatgacctcgccttccgggtcgaacctgcgcgccatgccgtgcagcaggtcgttgcggtacggcagcgactgcgccagcgtgccgccggcgccgtactcacgggtctcgccctcgagcctgccggcgcggtagcggctgcggcgcaccaccgcgccctcatgcgcatagacggcctcgtcctcgagccggccctgccggtagacgcagcgcgcggtcacctcgccggacggcgcgtagcacacgctctctcccgcgagctgcccgtcggcgtacagctggcgcgtctccagccggccgttgcggtaggtggcgctggtgccgtgcaggcggccgccggcataatgcgcttcgtattcgaggctgccatcggcggcataggcacgcagcagccccgccagttcgccatgttcgtattcggcatccaggcgcagcgagccatccggatggaagcactcgaacctgccgtgggggcgcccgccggccagcggcacgcgcgacaccaggcggccatcgccgtcataagcttcggccatggcgggtcctggatcgggcggcgtcggggcagctaaagtcatggctctgttccgcggctcagttcagtttcaccagggcgcccttgagctcgagcatgccgccgctttccaccgtctgcgcggccgacgccttctgccggaccatcatggcttcgttgctcagggtggtaccggccttgctgctcaacgtggtgccggcctcgcactgcagcgaggttcccgccttgaacgcgatcgatccaccgacctcgatcaccaggttgccggccaccgtgagcttgtagttgccgccaacgtcgtgcgcaaacgccgcgccgctggtgtgggtctcgtcgccgtccgccttgacctggcgcgtgccgctcaccttgtgtgtttcattgccggaccgcacttcgagcgcaaggtcgccggccttgaccaggtgcgattcgccgcccgcctccaccatggtggacaaggtgtctgccaccgaaaccgtcatggcgcgctgggcgcgcaggaacagctcctcggcaccagccttgtcttccatgcgcagctcattgccggccgacccgcccttcgatgcgcgcgaacggatcacgctctgcgtctgcatggcgggcagcggcaccggtacgccggactggccgttgtagacgctgccggtcaccagcggccggtccgggtcgccatcgacatagctgaccaccacctcctgccccatgcgcggcaggaacaggtggccccagccggcgccggcccaggcctgcgccacgcggacccagcatgagctgtcctggttggcgccgggcgcacggtcccagtggaacttcagcttgatacggccatgcgcatcggtccagatctcttcgccctgggacccggccacggtcgcggtgtgcgtgccggcgaccagcggccgcggcgtgctgagcggcgcgcggaatggcaccgacagcggcaacaccgacacggtattgccataggcatcaccgctccaggcatgctccaccgcgcgcaccacgtaggcgatatcgagcgcgggatcgacgtggccgtgcagcgtgaagcggatgcccgcggccaggtggtggcacgcgctctcgcccatgcccgtctgcgcctgggcctgctgcgcgccggcccggatcgcggccttgcggctggcgtcggcggcatccttgtgccggccgggaaacacgtactgctgcgccaccggcgccgcgccggcctgggcggtgccctgcgaggtccgggcctgcaggtagtcgtagtcggccagaacctgcgtcgcggcgccaagctggcgcgccatgccgaaggcgagcatccgtgccgcgccggcctgcgggcgctccatgtcgtgcatcgccaggtcggcgcagtgcgcgccgggcgggtgggccgacgggctgtcggccagcaccatggtgtgcgcgccgtccgcgaacgtgaagaagtagaagatgccttcctcctccatcagccgcgagatgaagtcgaacgggctttcgtcgtactgcacacagtactcgcgcatcgggtagcgcgtttccgtgatgcgggcctcgaacgccacgtcgaaggactgcagcacgcggcggatgatctgcggcgcggacaggttctggtagatggcgcggtcgcgcccgagggtcagcagccacagccgcggcgccagttccgcggtgtagaagccatggttgtggtcggcgccggcgtgggcaaagcgcgtgacgatgccgttcaggtagcggggcgcgccgcccgggtgctgcagcgtgacggtgaggcgctggcccacgatgcggcccgcgtcgagcgccttgtccgccgagcgcatgcgcaggctgaagcggaacagctcggacagcgcctcgcgcccggcaaagccgtcgagcagcagcacgtcgccgccaaacggcgtggccagggtcgcgaagctgccggcctgggtggcctgtgtcgggatcatgcgtcagcaccccgcttgcggcaggaagcggaacgccaccccgccgccggtgtcgagcgagagatgcacgccgccgaacggctccgagatcgacagctgctccagcacgcgccgcgccagttccggcagcaccgactgggtcaggatatggtcgacattgcgcgcgccgctgtcgacctcggtgcagcgctgcgtgatcgcctgcgccagcgcctcgtcccagctcaggcgcgcgttgtggttgcgcgcaaagcgctgcgccagccgcgccagcttgaggtcgacgatattgcggatctgcgcatcgcccaggtggtagtacggcaccagcaccaggcgcgccaggaacgccgggctgaactgcctgagcagcgccgggcgcagcttctcgaccagttcctgcggcggcgggcgccggccgccgcgcgaggcctcggtgatcacgtcctgcgccgcgttcgaggtcagcaggatcaccgtgttgcggaaatcgatcggcacgccttcgccgtcttccatcacgcccttgtcgaagacctggaagaacagctccagcacgtcgggatgcgccttctccatctcgtcgagcagcaccacgctgtacgggcggcggcgcaccgcctcggtcagcacgccaccccggccgtaaccgacatagcccggcggcgcgcccttcaggcccgacacgctgtgggcctcctggaactccgacatgttgaccgtgatcatgttgcgttcgccgccgtagagcaggtcggccagcgcatgcgcggtctcggtcttgccgacgccgctcgggccgaccagcaggaacacgccgaccggcttgcccgggtcatcgagatcggcgcggaacgtgcggatgcggcgcgcgatcgcgtcgagggcctcgtcctggcccaccacgcgctcgccgagcttgtcctggaggtacagcaccgtgtgcagttcgtcggccagcatgcggccgaccgggacaccggtccatcccgaaatgacctcggccactgcggccgagtccacgcataccggcaccatcggctcatcgttctgcaccgcctccaggcctttttccaggcgcgcgagactggcgccaagcgactccgcgctgtcggcgttgtcgtcgtcctcatgcctcgccacaccgtcggcaccggcctcggcctggctctccttctcgaggaacgccgcgatccggcggcgccaggccaggatttcctcgacggccagcttctcggtggcgagcttgtcgctgagccgcgcgtgctgcgcccgggcttcgtcgcgctggcgcgtgacggcagcgatttcgtcggcgcgcccggtgccggtggccgcctcatggcgcaggatgcgcagctggttctcggcgctttcgatcgagcgcccaagcgcttcgatcgcctcgggcacgccgctctgcgcggccgccacgcgggcgcaggcggtgtcgagcacgctgatggccttgtcgggcaactgccggcccgagacatagcggtgcgaaagcttgaccgcgtcgcgcacggcgtcgtcgaggatctccacgccgtggtgcgcttcaagcttgcgcaccatgccgcgcagcatgtccacggccgcggcctcggccggctcgtccaccttgacgatctggaagcggcgcgcgagcgctgggtcgcgctcgatgtacttcttgtactcggcccaggtggtcgcggcaatggtgcgcaactcgccgcgcgccagcgcgggcttgagcaggttggcggcatcgccctgcccttcgctgccgccggcgccaatcagctggtgcgcttcgtcgataaacaggatcaccggcaccggcgaggccgccacctcggcgatcacggacttgagccggttctcgaactcgcccttgacgccggcgccggcctgcagcaacgccaggtccagcgagcgcaccgacacttggcgcagcgccggcggcacgtcgccggagacgatgcgctgggcaaagccttcgaccaccgcggtcttgcccacgccggcctcgccggtcaggatcgggttgttctggcggcggcgcagcagcacatcgatcagttgccggatttcactgtcgcgcccgcgcaccggatcgatcgctccggctcgcgccagcgccgtcaggtcgacagtgaactgctccagcgccgatgcctgcccgctgccgggtccgcgctgcggcatgccgaacgctggcgtggccgccgctgccgggattgcatcggttccgggcccgccgccaacggcggatgcccccagcagcgcgggcagggcctcgcgcagcgccgcacgcggaatccgcagcagcgccggcgccgattccagcagcatgccgcgcaggctttccacctccagcagtgccagcagcagcgtgccggcgcgcacttgctgctcgccgagcagcatcgaactgagcagccaggcctcctggaacagcggcgagaagttaggcgacagcgccggcgtgcggccgttgccgcgcttgaagccgtcgatcgccttctgcagctgcgacaccacctgcgcgggcgccaggtcgaagtgcgcgaggatcgcctgcaggtccgtggcgccgccttccagcaattgcagcagcaggtgctcgacgtcgacgctgtagtgcgtctgccggacgcaaagctgggcggcctgctccatcgcgtgccggcactcgggattgaggcggctgagcagcgtgcggatatcgatgtccatgtttgtgccggtcaggatgcgtgcgctcgcaacgccagttgcaccggcgcgggccgtgcctgggcgccgccggccagccaggcggtccagcccaggcgcgcaccgagccccagccccgcgggctggcgcgtgccgagatggagcgcgagccgcacatcgagcggttgcggcacataggcgcgcaccagcgccgcgaccagcgcgtggtcgcgcccgccgggcagcaaggcccgcaggcgctcggctccgggcacctgcacatcaagccggatgccggcggcctggtcccaggtgcgccgccccagcaccgcaccgccgccgagcgtgatacccccggctgcaccgcgtccgccgagccgcacggcatcgctggcttcaaccggcagccagccgccgagacactgcgtcccgctcacgcccaggccgagacggtcccccagcatggccagcaaccccgccatcgaacgcggcgccgcgcccagcagcccggcatggcgcagccacggcgccgcgccggcgggtgcattggcggttgagggcccacgctgcaagccgaggttgctgagcgcatccaggcacgccgccagcgtgccgccggtcgggcgctggccgcccagtgcgggcgagtgcttgcgccggccgcgatacaggaaggacaggaagcggtgattgaagctgtcgagcaggtcgcccatcgcggggtcgcgcgcggcgcggcgttcgagcagcatctcggtgtatgcgagcggcagcggcccgcctgcccccgccagcgacatcacgggcgtcgtcagcgtgaacgggcgcccgccccggccagcgccttcagcggacgcgtgcaccgcgccgatgtcgcgcggctggaaggccagcgagaccagtccgcgcaggcgcaccgcctccccggcgccattgccgcggccgaccggctgagcccccggcaccgcgcgttcgatcaggctgatggcctggaacaggtcgaagccggccgggttggacgccaggcggtcgatcaaagcagctgctggctgcccgtcatcgcgggccattgcttccatatctcgtctccgcggcgcacgaccagccgcacgaaggaattgactgaggcatacagcgcaaggaagcgcgccagcaccgctcccagcagcagcggcgagccgccgacaaaggcatcgggatcgaactcgatcgagacctcggtgccacggcagtagccgcgccaggcctcggtgcccacgtgcgcggccgcgccgcgcgcgcgcacgctgcggatgccccgcacctggtcctgctggcggtggccgtcgcccgcgaacagccgcagcatctgctgcacctcatggcgcccggtgccaccgccggccagggtgccgtggtgcagcgtcagcagcgagatcagcggccacaaggtctcgctgcccatgggcggattgcgctgcacggtcggctcatagaggcagcgcacctgcgcgtactgcgacacatcctccagcaccatgcgcgcacccaccggcacctgctccgcgagccggcgattggtgcacagcacgttggcgtacgccacgggtgccgccggcaggcgctgcacgttgcccgcatcgatgaagctgagatacatgtcggtgccggacaggttggcccgcaaggtcggctcgcggcgcgcgtgccagaacagctcgccttcggccgggtcgtcggtggccgccgcgaacggcggcaccgccagcgagcggtcgctggccggatccgacagcaccaccgaccggatcgaatggatctcggtcatcgcctcgcggcgctggtctgccaccagccggtactcatagtgccggtggtcgatcatgatgggctcgctggtctgcgagaacaggttgatcgccggcacgcagccaagccggaacatgccggcatgcagccggcccagcccgggtgcgctgcgctgcaggcgcagcaccacgtcgcagctgcggcccttgccgagccggccggcgggcaggtccaggtcgaagaagtgaaacttgcgcgcgaaggcgaaatactcctgcatcagcccgtaggccggctgcgcatgcggcggctgcggcagcacgttctcgccggggccgtagccggcctcgcgccacgcgctggcgggcagccacgccggcgggccatctggcggctcgacgctgacgccggccacgctggtgaccagcagttcatacaacggcacggtcaccatccagtcgccgtgcagatggatgcgcagcgttcccagttcgagctcggagaaatcgacgccgtcggcgcattcaagcgtcagccgcaggccgttgtcatcggtcatgcgcgcgtgcgtgaccgccagcggccacagcgtcgtgtcccacgccgtgcgaaagcggcacatctcgccgccctcggtgcatgcatgcaggccggtgtggcgcggcacggcgtagccggcggtcaccttgccctgggccgcgtcgagatcgaactgcaccaccgtcatcgacggcaccggctgcaccagcgacgggcacacgttctccagcagcgccgcggcaacttgcgggaacacctggtccaggtcgcgatgcacgcgcgccgccagataggcggtggcttcgatcaggcgctcggtatgcgggtcgagcgattcggtgccatgcagcgcaatgcgcgcggccacgttgggatagcgctcggcaaacgcggcgccttccgtgcgcaggtaggcaagctcgcgcttgtagtacggcaggatgccgccgtcgccggcaccgtctgcgatgccctcagccatgatcgccccagcgcgggtcagcggcctggcctgccgcggcgagctcgaacgccacgcgcaccggcgcggcgcccagcggcaactcgccgtcgatcaccaggaccgggcgcggggtgtcgcgctcggcaaagcgtacgcgcgcctggcgcaggcgcggctcgaacatcgcgatcgcatgcgcaaccagcgccgcaatcgcgtcgcagtccggcaccgactggaacgagcggaaggagaagtccggcacaccgtagtcgagcacggtcccgtccgactccaggaactgcgccgccgtcagccgcgagcgcgtattgagcagccgggcaagctcgcgcgccaccgactggcgcagtggctcgccctggagcaactgcgccgagggggcgttcgcacccgccgacagccgctcgaacagcggcatcggcgacccggtgacgatgacggacatgtgcagccccgcttacgccgccttcttctgcggctccggcggcgcggacactgcgcaggccatgttctccaccaggtcccagccgaacgccgccgtgccttccttctgcgcgtcgcccttctgttgcgtgaagaacgcggtgatgcgggtgaagtcgagcgtgaacgtgtcggaggaatcgcccatgccgccagcggtctggatggactcgacgatcgcgtcgctcagcgtgtaggtcatctccgagcggaacgcaccgtcttcggttcgtccgatctcgagtttcacatcgccgagcgacttgccggcggcgcacgcggcgtacaggccgggcgtggcctggtcggtcttctttgacatcgtcatgctctggaactgcgccttgcccgaggtgcgcttcgagttggccgggtcattggtcacggccatcgccacgccgtgcgagaacgaatagatctggatgcgctcggcggcacggccagtctgctgcttgttgctgcccttgatctcggggatgtcgagaatgatggtgtccatggtgtctgtgctctctcagttccgttatgtccggggatgccgggatgcgagtctgccggtctacgctgccgctgccggcaggtctgcaaccaggcggatcgatgcggtcagttcttccatctggaagtgcggcttcaggaaacacgtggcacggtaggcgccgggcttgcccggcacctcggtcacgtcgacgcgcgcggcgctcagcggaaagcgcgacttggcctccggcgtcgcggagggattgagcagcacgtagtcggcgatccagttgttcaggtagcgctccacgtccccgcgcgtctggaagctgcccaccttgtcgcgcatgatcaccttcaggtagtgcgcaaagcgcgaagccgccagcacatacggcagccgggcagacaactgcgcgttggcgttggcctggtccttgttgtagaccttgggcttgtttgccgtctggctgccaaagaaggtggcgctgttcgagcccttggcattgacgatggcgatgaagcccaggtcgttgagctccttctcgcggcggtcggtgatggtgacctcggtcgggcacttgagcgcgacgtcgccttcatccgtcttgtaggtatgcgcaaccaggccgtcgaccttgccgccgccttcaacgccgcggatggcggtcgaccagttgtacttggcatgcgcgtcggtgatgcgcaggcccagctggtaggccgagttggcccacaggtacttgctgtggtcggtgccgtcgacgtcttcttcgaaattgaagctctcgaccggattggttctggcgccgtaaggcaggcgcgccgcgtaggacggcagcaccagcgacacatagcgcgaatcctcggtttcgcggaagccgcgccactgcgccagctccgcgctctcgaagatcttggccaggtcgcgcgtcacgcccagctcggtgaaagcgcgcaggtcgaacaggctcggcgccgcgctggtgatgaacggtgcatgggcggcggctgccaccttcgatatccgctcaagcagcgccacgtcctgcggatggcggccgaagctgtagtcgccgatcagcagcgtgtagggatggccgccgaaggtgccgtactcttcttcgtagatcttcttgaacagcacgctcatgtcgtggtcgactgcggtttcaagatccttcagcagctcggccttggtcacgttgagcaggcgcagcttcaggctggtgccggtctcggtgccgtagaccatgtcgtgcaggccggtccacgcgccttccagcgcctggaacgcggggtcgtgcatgatcgcgttgagctggtcgctcagcaggcggtcgatctcggccacgcgctcgttgatggttgccaccaggctcttgtccgggctggtgcgcatgccctcgtcaaggatctgcgaggccagctggccgatcagcttcctggcatagccgctctgcgacggctccaccgccatattgccttcctgcacgatacggtcgagcagcgtcagttcacgctcggctgcggccgtggtgctcccctttgattcggcgctcgcgttgtccgctgcggagttctttgccatctggttcaccctttgtgaattcgttgcgtcctgcgggcctcgatgcccgcgcccgccgccgcgtcatgccggcgtggcgtctccggtttccggctgtgccgccgcggcgccggagtcggcttcgctgcgcaccagcttgagctcatcggcgttgttgacgatgcgctcgagcagcacgtcgagttcgtcgttgccatcgagcttgccgagcaggtcgcgcagttgctggcgtgcttccagcagcttggccaggcgcggcacctgtgccaccaggctttcgggatggaagtcgctgaacttgtcgaagcgcagttcgaccttgagattggtgtcgcccttcatggtgtcgggcacggacaactccaggcgcggcgcgatcttgcccatgatcccgtcgaagttgtcgcggtcgatctcgatgaagcgccgttccttgagcttgggcggcggcactgccggttgcccggacaggtccgccagcaggccgaccaccatgggcagctcgcgcttctcgaccgcgtcaccgacctctacgtcatatgaaatctggacccgaggcgggcgatttcgccctacccacttctgcagactattggacatggaactctccggaaggactcgaatgtgtccggtcaaatcatcggtttcgcacggcagcccgtgctgaaggcaaaaccagtcccccgggccggcgcaaccggtccgaaaaaggtcgaagcgcatcgcgccgcagggccggcatggcggctgcggaagacggatgccctcgctggcaaacccactttttgttacccgttcctacctggcgcagtgcgcaggcagcaggctgcacgcgctcgaccccgctggtggctccgcgccagccggctcgcgcatggcgtgctgcggcacgacgaaggcaccttgtctttgcgcgccgttccatcgttgacccttgctgtgtttctagttgcggcgcgcaaattcaagcggaatttaaggtgacggtgaggtcgggcacaatccctgagaattggtattttgatcagcagggctaccgcccgaggttgcgccgcgcggtatcgcaaacctgcctggctggcccccagcctcattcgggggagatggcttgccccaacgcggcagcagcctctgcctgatttcaggtataggaaaaaccgcctgattgggctttacttctacccaaggcccagctgcatgccatgtaataccgtggcatgcgccgctaccaagggtcaaaccagaacgagaaaggggtcagccatgtcaatcgcatacgacagttgccgtattgcatcactgcgggtccgatggtgaaatcagcgccgctgatcatctgaactgcacccgaccgggcatgcagctcgcatccctggtcgcaccagcccccatgcctttctccatgccaacgaacgcgacgctctccgatagccgccgaaacgtcatgcgtggccaactgctgctggtcgggcacgagagcccgatgctgacgcgcctttgcgggatcctcaccgtgctcgactacgcggccggcgcgctctcgttcgcgggcaccatcgcgcaggcctgcgcgctggtggatcagggtccgttcgacatggcgctggtcgacaccagcctgcccgatggcagtggcatcgagctgatccggtgcctgcgcgagcgtgccccggatctgcccatcgtcgtgattgcatcaccgggcacggacacggaaatcgtcggcgcgctgatcgccggcgccaccggctacctgctcaaggagcgcgacgacatcgagctgacggtgtgcctgcggggcgcgctgcgcggtggcacgccgatcgatccgtccattgccaagcggctactcacgacattggtacccaaggccgcacccgccgagaccaggctttcaccgacgggaagcgtaaagccgctgctcagcgcacgcgagaccgagatcctcgtcttcatcaacaaggggtcgaccaaccgcgagatcgccgacgcactgtcactgtcgcggctgaccatcgagtcgcacgtcaagaacatctataagaagctggcggtcaagacgcgcacgcaggctatctttgaagcgcgtgcgtacggcgtgctgaactgaggcgctagcccatccctgagttggcggcgccgaagcggagcgccgttcctcgctgcgcatgctcgtgccaacggcatctggttcgatcgcgccatgctatgacacataatcttgaatgtgcgccagctaatggcacaaattggatatttgtgccatggcatgagaaaatgaccacggggccgtttccctggacaggacaagagatccggcctcgaatctcacgagggtgcacatgagccgacagttgcggttatcagcgccgagaacgctgcgttcttcgaagagatgcgacgcagcctgggcgcgttcgaggataacttcgagacctacctcgaggaatgcgtatgcttctccgtgcgctacctcgaccggcacaacggtggcttccaccacacctatctggcgaagggcgcaacgtcggaagtcttcacctacatcctcgagaacatcgcgccgatgtggcgcgacttgctggcagagccgtatcagcgctatgccgagtgccacggcccctccgtcgcttccctggacagcgtcatcgccctgatcagtcggatcgggcttgcgtactgcctcgtccccactgatgagcgcgcgattcgggagcagttggcgatcctccggccaaaccatcggcgatgacggaaagcgtccgacgccgccgcggcgggcccggggtgtttcgtcgttagacgcgtcatccggcctcgcacgccgtcacttccctgaacgcagctgcgcgaggatctttcctgcatgccgacacgctctgatagtccgttgtaccggagggccaacgctaccgccgcgcaagatgtgcaatgattcgctggacagccagcggcaagcacatccctgaggcttccgttttctcattcacctgacgctcaggattcttcaataatgtggcaaccggatcccgtcactcttcggctcttcatcgcggtctgtgaggaaggcagcatcgcccgtgccagcgagcgagagggcatggctgcggcagcagtgagcaagcgtgtggccgatattgagcgcgcactcggcacgcaactactgatccgcagctcacgtggcgtgaaccccacgccggcgggagacatccttcttcggcatgccaggcacctgatgcagggtgttgaacaaatgcaatccgacctgagcgagttctcctctggagtccggggcctggtccgggttcttgcgaacatttcctccatcgttgagtttctgcctgaagagatcgcgtcctttctgcagacccacgagaacattcacgtagttcttgaggaacgcgcaagttcggagatcgtcagaggcattgccgagggcagcgcagacattggcatctgtcgtgactttgtggcggaacgggaagtagaaatgctgccattccgcgcggatcacttctgtgtcgtcgtgcatcgcagccaccctctggcgagccggagcgaggtatcttttgcggacacgctcggctacgagcatattggcttcgcacccaacgtcgccctgcatgcgcttacccgcagagttgcatatgagaacaggcggaccatcaggtatcgggccaatgtcactacgttcgacgcggcgtgtcggctgattcacctaaatctaggccttgccgtgctgcctgcagaagccgtagaaaagtaccagccgctctacgatctctgcgtaatcaagttgatcgatgcgtgggcgacacgaaaattcgtcatttgtgttcgccacgccgaccaactctcttccgctgcgaaccgatttcttgcgcatttgacgcgaacactgccctagggaaatcccggcaaggttacggcaagcgggggccgccggttcgaccatcgcgtaggacgatggctgccatcgtcggaatgggattgctgcaggccccccgtggaggcaagctctgacccctgagcgtttgtgggaatttgagcttgccccgggcggcagcagggagcagttccccaaaagctcggcgcattcggagcacataaatgagtagcgcaagcacttcggcagcgcaacgtctaccgctgagcggaattcgagtcattgaaatgactcacatggtcatgggtccggcatgcggactgatccttgctgatctaggggcggaggtaatcaaggtcgaaccgcccaagggtgacagcactcgccggttactgggggcaggcgcagggttctttcgggcattcaaccgaaacaagaagagcatcgcagtcgaggtgagcgaaaacaaggacatggaagccttgctgaagctgattgacggcgccgacgtctttcttgagaacttcaagcccgggcggatgaaggctctcggcctggactatgaaacgcttcgcaagcgcaacccgaagctgatctatgtctcgcacaaaggctttcttagcggaccatacgagaaacgtctcgctctcgacgaagttgtacagatgatggcggggctagcctacatgacgggcccggtcggacgccctttacgagctggcagttcagtcaatgacattatgggtggcatgttcggcgcaatcggcgtcctggctgccctgtacgaacgcaacgccaccggcgcaggcaaggaggttcagtccggcctgttcgagaactgcgtcctcctgtctgcgcagcatatgcagcagtacgccgtgaccggacaacctgcggccccgatgccggcacggatcagtgcctgggcagtctacgatgtgttccagctggcggacggtcaccagatgtttattgccgccacgggagacgcccagtggcggacgctttgccacatcatcggcaggaacgatctccttgaggaccagcgcctgctttccaacaacgacagggtactggcaagagattggctgttgccgacgcttggagaaacgctgaaggccttccgtgccgaaatgctgacggctgcttttgaagcaggcaacataccgtttgctgagatcacccgtcccgaagagctcttcgacgacccgcatctcaaagagagtggcgggctggcgaagcttcaggtcgatgacggcagcaccaccgaagttcccctgctgccgttctcgctggatggcgcacggctacagcctcgcatgccaatcgcgcgcattggcgagcacacccgtgaggttctggaatctgccggttgtgccgcaagcgacgtggatgccatcgtggccaagcaccgcgggcccgggctcgcccaaccggcggctgcccatatggattgaccctgccgccacgtgatacccagcatggtgacgcaatccattcgtgaccgtagaagcctggcgacgttcaggctggttcagagatatcgagaacaggagacaaggatgaagaagggaatgactgcagcatttctgctcatgtgtggcgtgatggcgggaacttccgcggcccatgcagaaacaacatggccaaccaagccaatccggttggttatcccttttccgcctggtggcggcacggacatcctgtctcgcatcgtcgcaaacgaggtgtctcagaccaccaagtggacgttcgtcccagacaacaagcctggtgccggcgggacaatcggtatatccgatgtggtcaaggccgccccgactggatacgacatcgtgatggggcagaaggacaatgtcgtggtcgcgccatgggtgaacaaagccgtgacctacgacccgcgcaaggatctcgtggcgatcgctcatgtcgcctacgtccccctggttatcgtcacgcctaagaattcgccttacaaatcgttccaggatctggtgacggccgctcggaaatcacctggcacggtcacatacgcgtcgccgggcaacggcaccacagcccatcttgccgccgagatcattggccatgccgccggcatcaagctcttgcatgtcccctacaaaggctccaacgctgcgctggtcgacaccatggccgggaatgtgaacatcatgatctcgtcagtcccatcggccctggcgcagatcaagtcgggcaaggtgcgggccatggccgtcacctcagcgacgcgtagttccgccttgcccgaagtacccaccgtcgccgagagcgggtacaagcaggttgacgtcagttcctggtatggactcttcgcccctgcgaagacaccgaaggacgttgtggaacgcattggcgtggaagtgaacaaggcaatggccaagccagccgtcatccataacatcaacgaacagggcgcggaagcgaagtccatgtccgcagcagaattctcccagcttgtgcaaagcgactatctgaagtggaaggacatcgtaaaggcgtccggagccacggtcgaatgagcaggatcggccaagccgtacgcatgccatagcagatcttcacgggaaaccggcacggtcgaaagaactcgcgcgctccagccgcgctgaggggcacctggttgcgcgcagccctctgcagcgagcgatgaaagaccgtccaagggctcacttccgcctttggcatggctggccggtacccggccctgagcagagcagccatgatatggctccaccgggcagacatgctggatacggcactcccagtacgttagttccgcaatcctcaatgttccgccgaatcaatactcctccggcaaacctcggttcatacaatgatcggcaatgcattgtattgatcaagtaacggtacgccgaggctatatctcccgtctcaatcgagaaatacctccgtacgtcactgcgaggagtatttcaagaaatggccaggctgggtatagacattggcggtacgttcaccgatttcgcacttgaggtttttcacgatggtgccgtgcgtcaccacttcctcaaggtacttacaacgccccacgcaccagaagttgcagttgtggaaggcacccgccagatactggctgcagcgggccttcagccggctgatgtcaagaccctcgtgcacggcaccacattggcgaccaatgcggtcatcgagcgtcgtggcgcacgcatcgcgttccttaccacagagggattccgcgataccctggaaatgggcaacgaaagccggtacgaccattatgacctctatgtggaaaagccagagccgctcgtcccacgttgcctgcggctgacggtgcgggagcgcctggcgtcagatggcaagatcctgcttcccctggatgaggagggcttgcgagaactattgccgacgcttgatgcagcaaaggtggaagctgtcgcgattgggttcatgcatagctttgccaatccggaacacgaacgtcgggccgcggaactgctgcgcgcatggcgtcccgggatacgcgtttccctctcctgcgaagtcgcgcctgaaatccgcgagtacgaacgctttgccacggtttgcgcgaacgcctacgtccagcccgtcatggcgggatacctggagcgccttgagcgcgaaatggagactcttggcatcgccgcgccattgatgctgatgctctccaatggcggcttgtgtgaagccgaagtagcgcgacgctttccggtgcgcttgctcgaatcagggccggcaggcggagccattctcgccgcccatgttgcgcgaacgctcaagctggatcgtgcgctgctcgtcgacattggcgggacgacagcgaagctctgctttatcgataatggcgtgccccagactgcgcgcgcaatggaagtcgcgcgtatcgcccgtttcaaggccggaagcggcattccgctgcgcttcccggtcatcgaactggctgaaatcggcgccggtggcggctccattgcacaccgggacacgctcggtcggctgcaggtgggacctgaaagtgccagttcggtgccagggccggcttgctatggccgaggcggcacagcacccacggtcacggacgcgcacctgctgctgggcagaatcgaccccgacgaattcggcggcggcaggatgaagctcgatcgaggcgcggcccagcgtgcgtatgaacgactgggcgacgcgctcggcatgtcggcccaggatgccgcctggagcgtctgtgaaattgtcgatgagaacatggcgagcgcagtgcgcgaacacgcggtggaagtcggcaaagggctggatggccgaacgctgatcgctattggcggcatggccccgctccatggggctcgactcgccgccaaactcgggctggaccatgtgatcgtccctgtcggggcaggtgtgggctcggccttgggctttctccgggcgcctgtctctttcgaagccacccgcagcgtccttctttgcacggcgcagttcgatcccgattcggccaatgccatcgccgatgccctcatcgcagacctgcgccagctggttcgccgagctgcctcgacgcaacccatgacagaacagcgcatggcctggatgcgctaccatggccagggccacgagattcgtgtccagttgccgtcccggcggttccaggctggtgacggcgaatccctgaggcaggcctttgaggcggcctaccacgcatcctacggccgcacggtcgaagcggggcaggtcgagatcctcggctggaccatccgcgttgaagcctcggaggtccaggcgacccccgctccgatgcctgggcacccacccgcggccaggtcgatgggagcagcgtctcccggattccgcgatgccttcgaccagggcgcgagaacctgggaaagctacgcggttcatcgcatcgcggaactcgagcggacggatcccctaccggcgccggctctgcttgcgacaaacgaaacaacagtcgtggtcccgctgggctttacctttgcattggggtcgactggcgaactccagctcctgcgcaatcaggatctgggtgcccagggcactactgtcgcctcggccgcaatgcctgccagtatccgcctgcaagtcctgtgggaccgactcaatgccctggttgaagagcaggcacgcaccatgatgcggaccgcattctcgccgaccgtacgagaagccggcgacctggcagccggactcttcgatttgcagggacgccttgtcgttcaggcggttaccggaacaccaggccacgtgaactcccttgccgcatgcacggtgcacttcctgaagaagtacccgctcgcggagatgagcgaaggcgaccatttcattaccaatgacccgtggcttgcctcggggcacctgcacgacattactgtgttgtctccggtatttcaggctggccggcccatcggcttctttgcctgcacctgccatcaggtcgacatcggcggccttggcatggggccggatgcaaaatcggtatatgaagaaggccttcagattccaatgctcaagctggcgcgaaaaggccagctgaatgaagaccttctggagatggtgcgagtcaatgtgcgtcaacccgaggcagtgattggcgacatcctttcctacgtcaccgccaacgagagcagcggcaggcgattggtggcaacgctggatgagctgggtgaagcgggactggaaaggataagcgcctttgtttgcgagcgctccgccgccggcatgcgcgcagcgatagagaaactgccgcgtggtacgtttcaccacagcatggagctcgatggctacgatactccagtgcatatcgagtgccaggtcacaattgccgaggatggcgtttcagtgaccttcgatggcacttccggcgccagtcagcgtggcatcaatctggttctgaattacacgcgggcctatgcctcctttggggtccgggcggcggtcgcgccttccgttcccaacaatgccggttcgcttgcgctggtcgaggtcaatgccccggtgggctcgattctcaatgtggagcgcccggccccggtctgcgcacgacatatcatcgggcagttcctgccggaagtcgttctgggcgcgcttgccgctgcgatgcctgaccgcgtgccggcagagggtgcggcatgcaactggggcctccagttgcgtgggcagggtaccagcgagcaaccgcagggattcgaaatcctgttcttcaactccggcggatcaggtgcgcgtccgaacagcgacgggctctccgcaacttgcttcccaagcggcatccgttccatcccagtggaaatctgcgaaagcgttgctcccatcgtcatatggaaaaaggaattgctgcccggatcgggaggcgccggcaaatggcgaggcggcctgggtcagcgcgtggaagtgtccacccgtgacggcacttcattccagttcttcggtctctttgaccgtgtgcgcaaccccgcgagaggccgcaatggcggcatggacggggcaccgggatgggttggcctcaccaccggcgagaccctcaagtcgttaggcttgcagacggttccctccggcgaagtgttgcgcatcgacgttcccggcggggcgggctttggctgcgccgaagcgcgcgacagcgacgcgcgccaccgcgactcggaaatggggtacgtggcatgaaaagcggcgcggtgataagcacccgaggcggctggcaaaggcttgcgccggcaacagcgccgcgcccgaccagcccgtccttcaagcgccttttcgcaatctgaacccgtttcctcatgaaacgggttccaaatcaactttgcctccattggaggcaaagtgcagcctgagactaattcctaaccacatcaactcccatgaaaccattcatcgcttcgttggcacgctgtcttgtggtgttacccatggcgctcgctgcacagaccggtatggcgcaggagggtcctgtcaggatcctcgtcggtttcccgccgggcggcgtgaccgacgtcgttgctcgcctgctggccaaaggcatgcaggcagaaatcgcgagaccagtcattgtggaaaatcgtccaggagccggcggtcaaatcgcggcacaagtcctcaaatccgcccgccccgacggcaatacactgttcctgaccaacagtcataccactgccatgattccctttacgaatctccatccgggatttgacccccagaaggacttcgttccagttggcctggtagggacgatgccgaacttcttcgtcgtgaatccggaaatggtagggcccgaagtcgacagcctgaaggccttttctcaatgggcaagagcaaaggccggccggggcaacgtcggcgttcccgcaccggcgagcgcgccggagttctccatctcgctgctgaacaaggccttcgacgcggacctcaaggccgttgcctacaagggagatgcgccgatggtgcaggacctgctggcaggacagattcccgcggggatctgcgcaatggccgccgcgctgcctcacgtccgcgccggcaagctcaagcttctggctgtcgatggaccggaacggctgcctggctttgacgtccccacctacgccgagcgcggggtcaacggcctgagcgatgccatgacaatcggcatcgtcgcgccggccggcatcgcgccggcgctggtgacaaagtacaacacagccatcaacaaggtcgtcggatcgagggccttccaggatcgggttgccgaatccggcatcatcgccagcactggcactccggatgacatggcgcgcgttacggaaggcagcaggaaggccaatgcccagttggtgaaagcggccggataccagccgcagtaacggctctgcggcagactgtcagtatcagtctgccgcagcatcgccggggtcaggacatggcgtcaatcgtagcaggcagggctcacgctcgcgtgcagccagtggaccagtgttaccgcatcgaaaatcggcaatccggtggcctcgcggagggccctggaatgtcgcgggaaattggcacactcgcagacgatagcgcccacatcggggtgccgctgcagcaggcgccgcgctgccgcagccacttcctggcgatgagccggtccatctacccgcagccggttctcgcgatggtcgcgaagcaatgtactgctttcatcgagcgcttcgactggcaggtcgggcggcacgccgatcgcacgaaacagttcaccggtgagccccgctcgtgttgccgccaggatcccgacgcggcgtcctgccggcaggagttgctgcaccatcgggatctgcagaaggctggaggtagcgaccggaacggcacagcttgccgccagtcgggattgcagcggcgccaaaaagccgcaactggtggcaatcgcatcaaccccggtagccaccagctcccttgcaccggccaccagagctgccagcatcccctcggtgtcgccgcgggctgccgccgccgcatcggcgccgcgcatgaccgcatactggaccggaaatggccaggttgcggcatgcccgacgtcgccgggcagccgctcgaaccccgtgtcgagcatcaggatcccaatcgaaacaccgtgtacggtgcgtgaccgccgtccggcgtcgtaggcatccatggtcaatcaacgaagcaattgcatgactccatgctcgcaggaatcggccgtcccagctgcgtgagcttctttcggctgattaatgtcgtgtagtcctcggggcccggcttgacgggcgccagctcagagggccgcttgccatccaggatctttgctgccagttgggctgcctgcgcaccctgcgctgcatacgaggcggagtaagcgactgccaccaccccgcttttcttgatgagttctgtctccgcgctcaggataggaatcttgtagcggtcggtaacggaggccacggccggcatggacgactgcacgagattagagccgatggcatagacgaaatcgacgtccgacagcatctgcgtccgctgcggcacgtccatcgaggcatcgacactaatactacgcagggtcaagccttgccgcgccgacgccgcttcgatcgccttgattgccaccacatcgtttgcctcccctggggagtacagcacgccgaaccgcctggcgccggggaacatgcgctttgcgaagctcagcacggcgtcatagtccattgcactggccgatccgacgaagcgcgcgctaccctggcgccagttgggcacgagaccagccgccaccggatcgctgatcagacagaacaccatcggcagagacttgtccgtgatactcgacagcgctgcctgggaaaccggggttgtgactgtcaggatcaccgccggcctcttcgcctcgatctgcccgaggatctgggggatcatcgcgggcgtgaaattcgcgtcgctgtagacgtacgttgtgttccttccttccacgtagccatgcttgcgcatttcctccttgaagccggaaacgctctgatccagcgcgggatgcggaccaaagttggcgatgccgataacggtattgccttgggggccgcctttcgcggccgtctcggccgcgccactgggcgcggccagcgtggcagccgccagcgccaggcccgccatggcgacgcccgccgtcttgaatcttgtcaacatgatcgttctctccggggaaggcgtggtacaggttgccctgggttcagagggattccgagagctcgtccagtggcttgataccgccttcgttcgcgatgagcgcacgtttgcggacatagcgcaggatgctcgtcgcaccgtagcgcgagccacccatgccagagaacttgaaggccgtcttctccccgtcgaacatcatgccgcgttgcagttccgtgtcattgatgctgacaccaccggcttccatcttcgtcgcgaaatcgccggcggtatgcgtatccggaccaaagactgcaccgctgaggccatagatggaatcattcgcaaggcgcactgcctcatcttcgctggagaagcgcatgaccggcaccacggggccgaacgtttcctgcgtcatcaggtccattgagtggtccacatcgaccacgatggtcgggtcgagccacaccgcaccgccgacattctccaccgcaccgccggtaacgatgcgggcacccctgacaactgcgtcttgcaactgtgcccggacaatttccgcttgggcggcatgaatgaagggcccgtagtgacccccgtccgtggctgccgaactgcggcgaagcgtctgaacctgtcggaccagttcctgcacgaaagcctcatggatggactcgtccacgtagacccgctcgattgcgtagcaaacctgcccggtgttatagatggcactccggaggatgctggtggcggcacgttcgagatctgagccggccagcaccactgccgcgtccttgccgccaagctcaaggaatgccgggatgaaccgctccgcggcggcaaccgcgatcttgcgtccggtccccacgcttccggtaaagacaatggcgtcgacttccgcaagcaaggcccgacccgtttccgctgcgccctggagcagcgtgatcacgccctgcaactcaggcacgccttcaatcgacgcacgcaacggctccacgaagcggggcgtcacctcgcttggcttgatgactaccgcggcaccggcgagcaatgcggggatggcatcgatgaaggaaagcaccaaagggaagttccacggactgatgacgccgacaaccggatatgggaccagggtcgtcttgaacacgacatcgctgttattgcggaacttgcggaatggctgagcgaggacttccggtgcagcttcggaatacccatgaatgaaatggataacagcaccgagttcttcccgggagattctggcgcgagcggtatcaactgtcagagcaccggtgatggcgtccgccttgctttccaaagccctggcccaggacgacagcgcttgaatacggtgttcaagccctttttcgtaccactcccgttgcgcgtcccttgcccgcgctaccgcgtggcttaccgtacttgcatccgcagggatgaattcgtaatccagttcgccggtacgggggttccttactttgatcactgccatgcgttcctcgtcgtcaatcgcaccccgctgtcgggtatggggacgatcctatgcgaggaacacggcgggtcgtatcgggcccgaccaacgaatgccgatcgactagaaaatgctgcagattgccaatctccggccgcggcagggcttacaggtcttctcctgcggtaacgcccggcgcggatgaggaacgggcccggacgttgcgcaggtcggccatccgcctggcatccttgggagcgaagccgaagtaatcgcggaaagacgccgtgaaactcgtctggtgctgatagcccactgcgaacgccacctcgttgacactcaggcgttggttccccagcatctccagtgccctgtccatgcgcgcccgatggccgcattcaaacactgtcataccgtagagaaacttgaagccgcgcttgagtttggatgtgttggtccccacggcgcgcgccagctccgggatcgtcatcatgtgccgaaggtcgccgacaagaagatctcgcgccttctcaatcaggcgcaggtcgcgcgaagagaacacctcggcggtatggtggctttcgagataggcctgccacagatccaatgatgcgcacatcacctcgtatgccttggcctgagcgaagagcagccgccgatagccttcgtacggattctccagcagttgcttgacagcggtcagcacctcgggattgaccggcatctggtggcaaaacacttgctcatttcgcagcttctgcaattggtgccaaagggggccatcaacacccatggaggcccgcagaaaactgtggaagtattcacggctgatatagaggccaacggagcgccagaggcccgggccgcacgacacctggtaatgcatgtcatcgccctgatgcaccacagtgaggttcggcgaagtgacttcgatccttccggcctcggagaactcaacgctcaccggaccggcgaccatgaaatggaattcgatatagccctcgggcagcacgctctcactatgctgccgggtaaggtagccatccgagaccaccaggaggatctcatcccggatgctgatcagctcccacttcccttcttcggggtcgtcagagaccggaacggatccaccatacaggccggcctctccgtgcggagcggaagacaaaaaccccagctgatcgcgaagcgcactgaatgcctcgctggtacgagcgtgatggccagccaggcgcgtacggaacaagccatcgtttcccggctccggcgacgtaagattcagactggccatcatgtcttccccaagcaatttctggattgcgccgctagcgcttgcgcgggcgcgattgaccgggacgcggcaacgccgcgaacgccaacgatgccaccgcggccccggcaagacggcgcaatgtcgccgcatcgcggctcatcgtaatgcccgccgctgccgccctggtcacgccaaaaggaattgagttcggatttcctatgttcccagcgctaccgcacaggctggacaggtgcccgttaaggtaacgtcagcctaccttccgaactatccgagaaaaccatgaggcactacttgagccgtctgcaagcacgcggcgacctggcaattgtggagcgcgaagtcgatccccgtttcgaagcggctgcggtcgcgcggcaactgcaacgtgtctcgaaccaggccgtgctcttcaagaacgtgcgtggctccgcacttccggttgtcatgaacctgtatagcgaccatgagcggctgcgcgagatgattcgttgcggtacgcgcaccttctgcgagcggctggacgaggaaattgaagtcgctgccacgcttcaaacctatgcggaagaggatactcagcccgagcgcctccggagcgggaagctcagcgacctgccgatcctgacttaccacgagcgggacggcgccccgtacattacgtccggcgtgtttctcgcacgtgaccctgacacaggcgtgcctaacctgtcgttccatcgctcaatggtaatttccgataatgaactacgaattcggctgggaagctcacacgatctcgcccgctatcaggcagctgccgaacgccagggaaaggcgctggaagccgccattctgatcggcgcccctcccgaagtcttcatgtcggcctgcgtctcgctgccgccccaggcaaacgagctggcactggcctccgcgatgcgaggcggccctttgcgcacacgccggtgccagaccatcgatctttccgttcccgccgcgaccgacatcgtgattgaaggccggatcctcccaaacgtgcgccgcccggaaggtcctttcggcgaattcatgggctattacgtcgatgtgggtgacaaccacgtattcgaagtcacgcacgtcgcctggcgcaccggagcaatcttccagggcctgatctgcggctctgacgaagacctgcggccgctcgaggccgccaccgccgcgcgcatctatcgcgccatcaagggacaggtaccgggcatcatcgatgtgtcctgcaagcccacggtgatgaacaccgtcatcaagctccggaagcagtacgaggggcacgcacagcatgcgctgctcgcggcaatgggcgcgcatcttgactacaacaagctttgcatcgtggttgacgaagatgtcgacatctacaacctggatgaagtgatctgggctttcgtgacgcgggggcgtgcagacacccgaaccatggtgctgaacaatgtcccgggcttctaccgcgatccgcacaaagatcactggggccgccttgccattgatgcgactaaaccatggggacgcgaagcggagtttgaacgaaagcgcattccaggcgaagtggaaattgaacttggcaagtatctgcccgcttttgcgtcggaggtgcgctgacatgagcaaggaccgcacccgcatagtcgttggcatcagcggtgccaccggtgccatctacggtgtccggctgctggaagccttgcggctgctcgatgtcgaaacccatctggtggtgtcggcgtcaggctggctgaccttgcggcaggaatgcagcatagacaggcacgcagcacaatcgctcgccgatgtagcctacgacatccgagacattggtgccgccctggcaagcggatcctttcggcaccagggcatggtcgtggcgccttgctccatgcgaacattggccgcggtcgcccacgggttcaacgacaatctgctgacccgcgctgccgacgtaaccctgaaagagcggcggacattggtgctcctcgcacgggaaacgccactgactctggctcatctccgaaacatgactgcagcagctgagatgggcgccgtcatcatgcccccggtgccggccttctatgccctgcccaagacgctcgatgagctgattcgctataccgtatggcgggtactggaccagttaggtctcgcttcggaatccgcctaccaacgttgggaaggtatgcggacacatgtgcgatcggtgcgcgcacaatctgatgacctcagcgtgctgcacgtctagcggcaaatcctgactctccttgtcccaatggggccgtaaccccggccaggacaaccagagcaaacctgggcaaatggcacctctccaaacctaacgcgcctgcctgcgcaccaatacccactctggcatgacccgaccgatcggccgggcatgccgctccaaggaagctctgttccgctatccaacataaaaagaagccgtcccgagggacggctttcaagtcgcggatggagacaccgcataaggaaccaaagaagaaaccgttttgaatcaggcagcccgtgcaaggcgctcctgcgccaccttgcgtgactttcctggtttgcgcttggcaaggataagaagtgtgatcagcacaaaaaccgcagttaccattttcagatccgacggctggaagccgaaggccaagacgatcgagatcagttgaaaatacacaaccgagcccaacaccggcgccgccacctgccgcaggatcgtccggttcccgatgatcgcctcaccgagcagcagcgatgccagcccgttgatcagcgtgccgaagcccatgttgacgtcggcgaaaccctggttctgcgccagcagaccgcctccgagcgctgcgataaggtttgccaacccgagccctaccagcacatagaccttgatattgatgccctgcgccttggccatcgcaacactggagccaagcgaccgcatggccatcccgtgctgtgtccccaggaaccagaagatcaatgcgatcaatgcgatatccactacggcaagcaatgcaattcggcttgtcagggttccgtcgtcaccgggcaggtactggaagagatttgggaacgtgaacaaagcggtgttcggctggcccatgacccggatgtcaatcgaatacagcatggacaacaccaggatgccgcacaagagcgtattcaccttcaccttctcatgaatatacgcagtggcgcttccccccaggaagcctgccgcggcaccgatgagtagcgacgacacgggttccagtccgacgctcaggcatttcgccgtcacgcatgcaccaaaggcaagggtcccttcacctgtcatatctgcgaaattcaggatccggaacgggatcatcaccgcaatggcaatcagggcgtagatgagcccttgcatcaggcccattggcaccaggttgaggaatgtatcgaacaggttcatgcgctcaccatgcgaagggaggggttctcgtcgtcgaaagcggcaatcagcttttcaactgtcatgcgccgtttctgctccagggacaagtcggcaacaacagcgccatgccgcatcatgattagccggtttccatactgcaatgcatggtgcatgttgtgggtgaccatcagcgtagtcagcccggcctggtcaaccacttgcgaagtcactcgcatcacggcttcggcggtccgcgggtccagcgccgcggtatgttcatccagcagcagcaactgaggctcacggaggaccgccatcagcagcgaaagcgcctggcgctgtccgcctgagagcaggcctgcctgtgccttcatccgattttccaggcccaggccgaaggtgccgagcctctgctgaaactcgcgagcctgcgccgaggtcaggccacggccgaaggtcctgcgctgcccgcgcaaggcggcaacagcaaggttctcttcgatattgagcgccgcggcagtaccgatcgacggatcctgaaagactctggcgatgtactttgcgcgcaggtgcgtgccgagcggggtcacattcacgccgttgacgcggatgcttcccgaatccggcaggacttcaccggcgagcatgctgagcagcgtcgattttcctgccccattccctcctaccaccaccacgaaatcgccctggttcagttcgagggaaacgccgtcgatcgcaacccgttcgtcagctgtgccggcatggaaggtcttgtgcaaacattcgacttgcaacatggtggaagcagaatttggagttgactgtggcatgttgcgggctcgccgggcagctagttgataaagcattggcatgactccatcgcgggcggaatggtcagcccgagttgcttgaacttggtggtattgatggtggaaacgtagtcgttgggcgagggcgtcagcacgggaagcgcggccggcgccgtacccttgagcacgcgcgttgccagggtcgcggcattgacgccaatggagcggagcgaaacggcatagttcgctgccgcgatgccgctcttcacaaactctgtttccgagctcaggatcggcactttcagccggttcgtcacagaggccaccgccggcattgctgactgcacaagatttgagccagtcgcgtacataaaatcggtgccgcgcagcatctctgctcgctgagggatatcagcggtagtatcgacactgatcgccttgaatgtcagccctgcccgcctggatgcctcctcgagcttgcgggtagtggtcacgtcattcgcttcgccagggttgtacagggtgccgaatgacttggcgttcggaaacagcttcttggcgaagaccaggaccgcgtcaaaatcctggatatccgaagcccctacaaagcgactgctgccatggtcccatccttcaaccaatcctgcggcaaccgggtcggtcaccatggcgaataccatgggaagttttcggtcggccacggcagatagcgccgtctgcgagaccgatgtagtcagcgtgagaataacggcgggcttcctcgacgcaatctgcgtaagcatctggggcatcaaggcttgcgtgaagtttgcgtccccgtagacataagtggtgttcttaccttccacgtagccgctgcgcgccatttcctccttgaatccggcaatagtttgcgagatggatgggtgtgggccaaggttggcaatcccgatcacggtttgcgcatggacagcgggcacgagacccagcacggcaccaacaacggagacgcaggataaggtatgcagcaggaatctcttgtgacggggcatgggtatcctaaggcatggaaaggacatcggagctgtatgaacaaggcgtgcaacgccgtgccaaccaggaactttttagcaccgattccgcctggtttccgccgccccggcggacaacttccgatcaacttaatgtttcagtcgtttcgcctcaattttcctggaccgaacgcctggggtactggcccgagcaagggaaaatgctgacctcaacctcggccacgcacgctgtcaatgctcccaattgtggcaatcgaataccgattgctaggaattccgctctgagccgtccgatccgcttgtcccccctcttgccctggcctaggctgcgctagcctcgtgctgcccgtgttgtcaagcccggctccattgcgccggcaccggaccgcgacctggcacaaaaaaggggagagtcaatgcagtcaaagcggggaaaaagcactagcaaagtgcgtaaggtatggcaagtcacgttggcggccaccatcctgagcggatgcgcggaaagcgcgctcgcccagagcagcgtcacgctttatggcttcctctatagcggggtgcgatatgtcaacaacagcggtggccatcacgtgacgggattggcaaccggcccatcgcgatggggcctgaaaggccacgaagacctggggtccggattgcgcggcctgtttacgcttgagagcggcttcgacatgagcacgggaaactcacggcagggtggcaggctgtttggccgccaggcgtatgtcgggctctctgaccgttcggcgggtaccgtgacacttgggcgccagtacgacctggtagcggagtggatcgcgccgttcaccccacctggcaagtggaatggctatatggcgcacgtcggcgacaatgacaatacgaactggcagttccgcatcaacaatgcggtcaagtacgtgacgccaaacttcggcggcttccaggccggcgccatgtatggttttggcgaagttgcaggcgacagccaccgcaattcgaccatgagctttggcgttacctacgccggcggccgttttcgcgccgccgccgcttacttgcacatcgataatcctgcaagtgcagttccggagggcaactggaataccatccttttcccggccgtttcagccacgtcgccactgcagccgaatcgcatcgccccgtcgagcatgtcggttgccgcgcttgcaggccagtacgatctcgacaaactcaagctcgccgtgtcatttacccagagccgctacaaggacttgggcgatgccgcggacgggcttaccaacggtgatgtgcgtttcaacaatatcgacgtcaatggctcctacagcgtcgcgcccgcctggcagctcggcctggggtacacgtacacagccgggaaggtgcaaccgaccggattcacgccgaaatatcaccaggtcaatgcggtaagcaattatttcctctccaagcgaaccattctccaggccgccgttgcgtaccaacgcgcagcgggggacgcacagaacgcctacttgctgttcggcagcagcggcgcgtccagcacaagcgggcagctcatgttgctggcgggtattttccacgtcttctaaccgggccccaggcatcgcggcacggcggggagatggcccccgccttgccgcagcctcgcccaacctgttgcactacttgtgatgaatcatgaatccgtgccggcccgctcaggggccgctgttcttgccgacctgatccgagagtatgggcaccggcatgtcttccagatccctggcgagggcatcctcgagccactggatgccctcgctacccgccatcccgaaatcagcctcgtcaccttccgccacgaggcaggcatgacctacgccgcgcaggcctacgcgcggcttggcgaccggccttccatctgcatggcgggtcgcgctccgggcgccctgaacacagccctggcgctgcataccgccgatacggatagtgcggcgatgattcttgtcgtcgggcagccggcagccgcagaggctgagcgcgacccgatgtcaggatttgatttgcagcaggcgttacgcccgctcgtcaaggacgtcatcactgtcaccaccgccacgagactgcaggaagggatgatgcgcgcatggtgcaaggccagcagcggccggcccgggccggtggtcctggttgtcaccgaaaatgtgtggcgcgaggatgccacctgcgctccgctgcctgcgccctccataccagagcccggtccggcgccagggcaagccggtgcggttgcgggcctgctccgcgaagcccgtcgcccactagtgctggtaggcggcagtggctggaatgacgcagcgcgactacgcctgcatgccttggcacaagcccacaactggccagtcgccgctggctatcgacgagcagatctgttcgacaacgacgacccacactatgcgggcgaactcggcatcggtctcaatccgctgctggcagagcggatagtgcaagccgacctgatactcgccatcaaccttcgcctcggcgagatcaatacgttcgggaccggtggcttcggtggattccgtctgctcgatgccccgcggccggcccagcgcctggttcatgtgcattccagcgccgacgaactcaaccgcatttatcgcgccgacgtggcgatccaagctgctccagcgccctttcttgaggcgctttcaacagccctttctgcgacttcttggtcttcccctgattccgactggccagagggctttcgcatcgcgcgcgcggcgttcgtcgggaagggtgactgtccaggagctgtcgacctgcgaaaagtctttatgacgctgcgagagcgcctccctgacaacaccgtctttaccgctggcgcgggtgcctacgcgatctggctacatcgctatcttgcattccgccagcccggcaccatgcttggcgccaagagcggtgccatgggatacggattgccggccgccattggcgcagcgatggcgcggccggatcggctggttgtggccgtggccggcgatggctgcctgctcatgcatggtgaagaactggcgacggcagtccagcaaaatctgcgcatcatcattatcgttatcaataaccagggatatggcgccatccgaagtgcccagatccggcagttcgggcgtgctgtcggcagcgccttgcgaaacccggatttcgtagcctatgcaagagccttcggcgccctcgcggaacgcgttcagacgaccgcggaattcctgccggctctgaagcgagtactgaatggaaccgggccggcgctgatcgagattgccgtacccgacaccgtagcgaagcccgaatgaaccaacctatctccatcgtcgtcgttggtgccggtatttccggactcaccgcagcttaccggctcacggctgccggcttcaccgtccaggttctggaaagccaatcggccgtgggcgggcgaatggcacaacggcgcgagggtcccatttcatacaacaccggtgcgcgcctgatttacccgtttggccaggcgtttcactccttgctcgccgaactggatctgacgcgtgcgcttgtaccgctacgcaagctcggcgcaaacgccgcaatcggcggcgatcgttaccgtgtcgagctgatgcctggcccgcgcaccctcatgacgcccgggctggattggcgcagccggatacgcatggtcgcggcgggagtaggtctcgcgcgcctgcgctcgcgtaccgatccagacgctgcggcctcatacctggaaggcgacaccgaaaccctggcggattacatcagccgaaccaccacacccgccgtactgaagcaactcatcgaacccatcttccgcggaacgcgtagctggaatccggaggatatttcggcggcattctacgtcagtaccatgccgcatctgctcggcaaggacaccgtctacaccctggcagaaggcatggggcaggtgactcaggaactgggccgtcgggtgccagttctttgcgacgcaagggcctatgccatcgaacgacacgccgagggccaatgcatcgtacgctatcggcgcctcggacaagaacatgagctgcgcgcgaatgttgtcgtctgcgccacggagggcgcccaagccggcaagcttatcgtcgatcctctcgacgcggagcgctcgatgctcgaagcagtgcgatataacaagctgggtgtcgttcactacgcgctggaaggggatattcctgccgagctggagttctcaggccgtcagtcaacgactcgcattgcgacctggcaacagttgccggcggcaccgatcgcaggacgttcgcacgcgcaactctactgtcagctgacacccgaggcagccgaagaagcggatcgcctcggcctggccgattcgctcgacacccttatccggtcggaagtcaggcagcgcattccccgcttcgatagtcgagtgcacactattgtcaaccagtggattccgtacaagctgccgatcttctaccctggctattgccggaaggtggccgactttctcacctggcagtctgccgcgagacgatccgtctactactgcggggattacctgtcccaagcgctcctgaccggagcttgtgcaagcggcgactcaatcgcaaaagcaatcctggcgcaccacggttagctcatggttcaccaaggactggcttggcaagtaggattcaggcatatccggtgccgctgatgagaaaccccggccacgttgtgatccggggtatttggaagaactgctcacggccccgcgaacctattcgttcgcggaacgcgcagaagacccgctagcggtcacgaaataccctgaaatttagcgagccagactttcagctgcaacggtcaggagatgtttcccgcgactcgcatctccttgttctcctcgcttacgaattcgtcatcaccttgcagtacccggcgagcttgcgtaaggtcgaggtgaccttcccacgctgcgattgctaccgcacctacacagtttccgatcaggttgagcgccacccggaagaagcccatcagcttgtccaccgacaggataagcgccacacccaaaacgggaattgcggggatggcagtcaacgtcgctgcgagcacgacagtcgccgacccggggatgccatgcgcgcccttggaagtcaggagagagaccaggagaatcagggcgagggttccaccttccaacggcgtgttggtcgcctgtgcaatgaagatgacggcgcacgtcagccaaatcgagaaaccgtcgaggttgaacgagtatcccgtcggaataacaagccccaccgtagtctctttcacaccaaggtggcgcaactttgccatcaccagcggcatcacggcatccgatgaactcgagcccagggcgatgagcagctcgctcttcaggtagccgatgaacttgaacaggctaagaccggaaagccgcatcaccacacccagcacaaggaacaggaagattgcgcatgcggcatagtaggccaggaccagttggccaagctgctggatggtggcaaagccaaactttccgacggtgaaggccatcgcccctgcaacgccgagcggcgacagacgaacaatgaagccaatgacacgaaaaaggacttcggaaaggctgtccatcagctgacccaccatctttcctttttcaccggcgatttgaagcgcgcagccgaacaggactgcaatcaaaagcacctgcaaaatgtcgcccttcgcgaaagccgaaaggaaagtggacggaatgatgttcagcaagaagctctttacgtccgaaacgtgtgaggcattctcgacgaaggtttgtatcgacttcggatccagcgtggatacatcgatattcatgcctacgccaggcttcaagacgtacgtgacgaagaccccaatcagtagcgcaattgtcgtgacaatttcaaagtagataattgtcttgagcgctacacgccccgccgtcttcagatcccctgcatgcaggatcccagtcacgacgaaacagaaaacaatgggcgcaagcatcatcttgatgagcttgataaatgcttccgccagtggcagcagttgcaccccaaaggacgggtacacgaaaccaataagcgcgccaactgcaaagcccaagaggacctggatatgtaacttcttcagatacttaaacacaatttttctccaccatccgccttcgaagccatcgttgattccgacgggttcttcgctgttacttacttctctgcggtgccgcaaccgagaattgcatgttccatttcctgcctgaacgcgggaatcaccggccgcacctcctctggaagcacaaacttgtcgcagttcggaccggcgccgatccggtcaaccacaacgaagtcacaagcttcggtgggcaacagcacgtgatgccaaacacctggggcgtaattgatgccttgccctggtttggcgatgaaggcgcggacctcggccgcatccaccgaaactccccggggagcgaccactacgataaaactggtcggcttcatgggaatgaaggcttggctcgacaatgggtgacgttcgaggaacaccacctccaacggcaatacgtacggctttgcgcgcatgatgctgatgccagccttaccaccaagagccagagcatcaaccacggcgaggtcatggtagcgctcaaccatgccttcgttgatgtgatggaaggcgcccggggaagcctcaatgacctcgccgaacggcgaaaaggccgccttggtcaagggctccaatttcagggtgatacgcataggtctccttttatgcttatgactttgtcaggttccggccatactggtctgaccagtaataactgtagacttgccagaaagctcggtcaagtgctatatgtgataattatcagaccagtatgaagtgtcacctacacagactatgaaagcgacttccgctgcattggcacccaaggcgccgctgactgctcccgcgccaccagggcgtcggccacctatcgcattgcgcacgcctgtcacgcagcacgccttggagcgcatgcagacatccatctacagcggcgaatgggcggcggacagccagatcccctcacagcgtgagttggctgagctgctcggcgtaagccgctcttccttgcgcgaggcaatttcctcgctggagggaatggggctggtgcgggtagagcccggcagaggcgtgtttgtagcatcgctcgagcagcaggctgccgtcggcagaaactctgaagttcatcagatcgaccatacaccgagtgaactttatgaggcacgcctgttgatggaaggttgggccgccgccctcgcatccatccatatcaccgatgacgacatcgccgccctacgaaaactgctgggggagatggaaatcacggtaaaggaccacgatgtcacacggctgaaccagctggatttcgagtttcactcgctgatagcttcttgctgcggcaatcgcctgattcgtgcactacttgctccgattttctcggaggaagaaatgagcgccccgcgcctttccgacacggcattcctgagcagccgcgtcaaagagcacaaggaaatcgtggaagccttggcaacgcgcaaccctggcctcgctcaaatggccatgcgtaaccatgtcctgcgcagcgcaaagcgtgtccaggtagagctgcctgagcacgtacatcagctgccttgatgcaccacaactgcatgccgttggcgggaccgtcgcctgccaacggccgcagcatgcgtcagaaggtgaaatcgcgattcacgttcttgtagagcaggtatgtcgccttggaccaaccggtggcatagaagaactgcggacagaacggtgccatgtagatgaagtcctccgcccagcactcgtgccagtcattttgcagtaggtacatcccctgcccttccagcatatagagcccatgttccatgacatgcgtttccaccatgggaaagtaattgccaggctcgaagctcaggatgttgatggcaaagtcgaacgccggattttcatcgggcaacagatgctgccaggttcggcccttggtgtgcttgttcaccttctcgacattttgctcgtgtgaaaccagggctgccggggcttccacgccttcgaggcgttcataaggtttcttgatccatacgacgcgcgcttcgtcggcgcccgggttgtacacacgtacgccagttcccgcgggcgcgtatgcgaagccccctgccttgagctcgtgtgtcttgccctccagttcgagcgacacattgcctgaaacaacgtaaaagaaggcctgcataccgtcgtttcgcagggtcgtcattccgccgccaccctggatctgcagcagcagctgggcaaacttcgcgcccagacctggcgtagcttgaacgctgatggtggtcttctcaatccccggaatacggctttccagaatgccctcaggaggcatcaccgcatagtgagtcgttacggccgcacgatgatgagcgaacacaccggggggctgaatttgccgcttcgtcatttttttgaactccttgggtaggtgagggaagcaccatggcatggtgcttgaggttagaagcgatggcgcaatccgacagaagcgccgaatgggtcggcgccagcggccgctccggtgcggccgttggaaaagtcatacttggccgccgcctgattgagaatcttcgatatcgttgtgcgaatcattgttcgcttactcaggttgtagttgtagccgagcgtccacaactgtgcgccggtctggctgctcgaaccacagttgactccgttgcctcccgtgtccccttggcaacgaacatcattcgcacgcccgtacatggcgtagatttcgtgggctccccagtcatattcggtaacaaaagcccacgcatcccggcgcaagcggccgtcaccattggagaactggccatcgctgaccgaacggtcatacagaccgccgatgagccaccgctctgtcacctggtacttcacgccgacgcgatgtttttggtcgtggccattggtctgtgccaggccggccttgttcttgtcgtgtctgtcctcgtacgcataagcgacgtagaagggacctcttgcataggcaagcccggcaccaatgacgtggtcgttgcggccggtcccgtcggcgcggacctctccaaatccatactgcgcgcctacctcgatcccatagaaggacgccgaacggtagcgcaccgagttttgcaaccgtgaatcgtggtcggtcgaaatgccgttcatgctcgaaaccaacgactgcaacgccccgatgcccgtatttgcgcctggcgtaagatcaagggcgttgcccagtgcgcgcacgctggtagtgttcacacccagcgtgagagcccccaccggccgatggcgcagtcctacgaacgtatctcgattaaagaagggcgtgctggacgcaccagaatcaatcgaaaagttgccttccagctggaagaaggcgtccagaccgccgcctaaatcttctgaaccccggataccccagtacgacccttgcgaactcagtcgggtagttcccggcttgtcagccgccgggcccgcagtcgcgcccttggcgcttacatagtcaatcgcagcgtcagccacgccatagagcgtcacgctaccctgcgctgcggcgccggccgtgagtgccgataggactccgcccaccagtatacgtttcacatctctctccccgttgttattatcatactggtcataccagtatgatacgatactcacacgtgttggcagagtcaagcacactttcgaggagaggctgatgaacggcttgggtgggttaaatcagactgaaaacggggtcatcgtggggctgctgcagcttcggaaagcggatatcgcaacggcggaggacctgcgcctctctgccgagaggctcgcctcgtttgtgcaccaggtaaaggcggggcgcccaaatgtcgacatcattgtctttcccgagtattcgctcaatggcgcctcgaaggcgttgagcgctgatctccagtgcactgtggatggaccccatgttggcgtgcttcgtgacgcgtgtcgcctggcaaacgtatgggcatgcttctccttcatggaactcaacccgggcggcaacccgtacaactcagcgattctggtcaacaatgaaggccaagtctgcttgcactaccgcaaacttcacccgtgggttcctgcagagccgtgggcgccggggaaccttggcataccggtgtgtgaaggacccaagggttccaagattgccgtcgtcatctgccatgacgggatgtttcccgaggtcgctcgggagtgcgcctacaagggcgccgagttgatgattcgcatcgccggctactcttcgtcactgcgtcatcaatggcacctgaccgcacaggccgatgccttttgcaacctgatgtacacagcaagcgtttgcggatgctcagcctctggcccatttggtggaatgggcgaggccatcgtcgtgggtttcgatggagtaccaatccgccacggcagcaacaaggaaaatgaattgattactgccgaaatccgaccggacctggtacgcgaggcacgccgaacctggggtgctgaaaacaatatctaccagctgggccacagaggcttcgtggccgtcagcggcggcgcgaacgactgcccgtatacgtacatgcaagacctggtcgctgggcggtacagtctgccgtgggaagatgaagtcctcgtaaaggatggcacgatggccggacaccctcccccacggcgaacgtgacgaccggtgcccacttcgccaggttggcgaagcgggtttccaaatggctacggtcagcgcgcaatcagtccaggcgctcccaggagccggagtcttgtcactccgccgtcggggtagatattcagtctgacatgggtgacgagcgtatcccgaagcgccgcgctcagctcgacagcattctggcatccgcccttcaggttactgcgccctaccagttccggccagtacatcgcctggttcagaaccacctcgtcggtggcactttcgaggcatgcgccttgcagcgaaaaggcggcaggaaagttgcccgtgtagtaggtcgtatcgaccaggacgcgctccagcgtccccggtgccgccaaggcaatcacggcccagtcatgccccggcttcctcagacgcctggtttcccagcccttgccccattccactgagggacctggcgcaatcatggcccgtaccgcgccgaagtgcgtatcactgcaacctacaatgcgggcaccgttttccagtgccgccagatcgcactggccagccggaccgagcgcctccggcagttggaccagcccaaagacacgaaagcgagccatcccgccgtccggaaaaatgttcagccggacatgtgtgaagacccctcttgcgtcgactgaaaccagtcgttggctgtccccggcaagctcggtcgcgggcacgagcgcggtccattcgacatcggcgatatcgtcatccgccgaaatggcgcaggcttgcactgacgcggccaaaggatagttgccggtgtagaagctggtgtcgaatcctatcgcggtgatctggcctggccggccaagcttgataacacaccattcgttgccagccttgcgtcgacgagacgtctcccatccatctacccagcgcatcccttcgtcatcgtgatagtagtagttcgccgctttcgggttgagcatgcgcgatgccggcgcataccactcgtcggacgccgctacgactgtcgcgcccagacgctcatccgccagatccacgtacgcccgttcactgcgaaggaacgcttccgaaggttccgaacgctgccgaatcatggtcctgtcattacttccgcctgccatcatctgcctccctaaattgtccgcaatgcagactgattgaatccgccgcaccccagccagagctgacatgcggcgatacctgacggcgttagctccaaggcctggaacagcgccgatatgaaatggaaaggcctccccgctcatgaatgagtgcgccgagatcggcgagccgctcttgccctgtcgtcaccgtaagcacgtggtggccagacagttcgccgctggggcaggcaaagcgcgtaggcccgtaaggaatcaagagttctccgcctacatcgtcattccctccatagagcagaatctggcccacggctggccgcgatatgcctccattgccgatatgctttgcggttcctcccaggcgagcgaaaaccgcatggccgctccagcgcccttgcaggaactcccattgagccggcaacctctccatcaaccagtcacatgctgccggcgagaggtcttgctcaagtcttgccagaaaggaatagggacccgccttcatctcgatatccataatttctccgattcgcatataggcaatgcaggggcctggccaagccaaggccattgaacaacatcaaccgcggaaacgcatggcggttccgatggcacacgcgaacacgatggataggcacgcagcgatggctatcatggcgttcgccaggcccatcagccctgccacatatccaacgagcaagccacccacggcagcgccggcgcgaaacgtcatgacgtggagcgcgactaccctacccttatgcgtctcaacggcttgcatttgagcgaatgcacttgagcagatgttcacagcggcctgaccgagcgcaaaaatcccgatggcgaaataaccgcctagttccgaggacgatagcgaaagcattgcggtgcctgaggcgagaaagacaagcgaaatcacctggaccttcagcagcgtccgaatgtgactgacaagcgaaagcaagaggccagccgcaatagcaaggactccaaacaatgcattgatattgccgagcacccttgcatcctgtcgcaggatgctgtcgacgattgccggcagcatgtcgataacggggcgacccagcatcgcatacgcaaggtagaccaggaagaccaggcgcatggatcggtcgtcaaggactgcggtgaatgcacccttcagcgttacgaggaaggattcccgcctgggcggccgtactggcttggtctcaccgtcatttccggagagaactcgcacaaacatggcatctgccagtgcggtgacgccactcaacgcgaacgcaaaaaacgagagattgttcgttatcaagtacgccgccccaagcgggccgacagaacgtgcgatattcatcgagacagagttcaccgacacagcactggcgatttcggtcttctcgaccagcttggtgagcaatacctggcgggccggctgcgaaaagcttccgcatatcccgacgagtagcgcacacgcaagcaacgcgaaaatcgtcaggtttccggtgacggcaagcgccgccaggactaaggacgtcagaccacaggtcgcatcagcgatgcggacgacttgcctgaccttgcctcggtcgaccagtatccccgcgagcggggatacgacgaaggatggtgcaaactggacgaagatcagaatgccgagcagcagttcagaatgagtttgctcccatgcgtaccatcccacgaccacctgctgaacccatgtcccaatctgggccgaggtatgaatcaggtaataggcagcaacccgcggctggcgaagaactctcatgctcgcaaagtcatggactccacacccatgtcattgcgagaataagtatcctgcatcaaagatgaatcggcctcgaccagcgagttcgcgtaatggcaccggacagcacgcccgtccccatactcgctcaacgccggccgttcattgcacacgtccgaccgatacgggcaccgcggggagaagcagcagccttccggcctttgcattgggttcgcaacgcccgccaggattcgattcgcttcatcctgttcccgccgcaccaaggtcggcgtacttgcgagcagcgctttggtatagggatgggccggatttcccagaacctgctcggcaggtccatattcgacgacttcacccagatacatcacggcaatctcatctgccatatgacccaccacagcgaggtcatggctgataaacaccagcgtcagctgaaactccttccgaagttgcagcagaaggttcaggatctgagcttgaaccgagacatccagcgccgacgtcggctcgtcgcagacaatcaatgccgggttggttgcaagggcacgtgcaattgcaacgcgttggcgctgcccaccggagagctgcccgggtgaagcgtggtgaagccgggttggcagaccgaccttcccgagcaagctggtcacgtgcgcgtcacgttgtgccgcgggcatggccgcagacaggtcaagcggccgccgtacaatctcgctcacactgcgactcggattgagcgatgagtagggatcctgaaatacggtctgcacaagggctgcccgctgcgcgggctcatacgctccaatgggacgttcatcgagcagcacttctcctgaaactggctgctccaacccgagaagcatccgagcaagcgtggacttcccgcatcccgactcacccacgatggccagtgtccggcccttctgaagacgcaaggacacgtcaaccacagccttgagcgagagccgtggcttgaacaggccgccgcggacctggtacgtcatggagatgtcctttgcttccagcagtacatctcccgccggcctccgcaacatagccataggtgtctcgacttcctccggctgcggggcgctggcaaggtgacatgcaccagagtgcttcttgtcgtaggcacgaagcttcggcgcttcgagaccgcatctggcgaatgcgtacttgcaccgacgctcgaagacgcagctggctggctgggaatagaaagactggacggtgcccggtagtgtaggaagcagagtgccggcctcatgcttcccaaggtccgggatcgaccgtagcaggccctgcgtatagggatgccgcgatgcggcgaagagtgtgctcgtcggtgcggcttctacgatttctccggcgtacatgacggcaacgttgtcggcgactgatgctacggcccccaaattgtgggagatcagcagcaatcccatgccgagctctcgacgcaggtcatccaacaagtccaggatctgcttttggaccgtgacatccagggccgtagtgggctcgtcggcgatgagcagctgcgggcgattcatgagcgccatggcaatcatgatgcgctggcgttgcccaccggagaactcatgcgggaacgatgtcatacgcttggccggcgaggcaatacccacccgctccagcagctcaatcgcgcgtctgcgggcatggtcgccggccaccgcctggtggcgccgcattgtctccgtcaactgcctgccgatgctgtagacggggttcaaggccgtcattggctcctggaagatgtatccaacctgagtccctcgcacggtgctcgccaggtcgcgctcagacatgctggtcaggtccaggccatttacgcgcagcgtgtcagccgagcactgtgcgcgccgtggcagcaatcgtggaatcgaaagcgcagttagcgacttgccggaacctgactcaccgactactccgaggcactctcccttgtcgattttgaggctgacgttacggacagcatgcaatgtgcgcctgttctccagcggcagcttgatgctgagattctctacttcaagaagcatggcgttcaatcccgagtctgtggctggatgacatcgcgcaacccatcgccgagcaggttcacgcctatcacgagaagaaagagagatgcgccgggcagcaagacaatccatggattgaggaacatcaccgccttgccttccgagatcatcaacccccaggacgggatgggcgaaggcactccgacgccaaggaacgacagcgacgcttctgccaggatagaaaccgccacttccgcagtgaatacgaccaatagcgacccagccaggttgggcaggatgtcccagacgatgatttggcgagcactggcgccagccaatttcgatgccttgacatagtccagttctcgaatccgctgcgttgcgctgcgcgtcacgaccagatagagcgtccagtgcatcagcccgataacgcagacgacggtcgtgagcgacggctgaatgaaatagatcagagtcatcgccaggagcaagctcggaagcgcaagcttgcacgtaaggccgaacatgacagcgtggtcaaccaggcgcccgaagtatccggcgatcgaacccaacgttattccgatgacggcgccgatagacgcggcgcagaagccaatggtgagcgatactcgcgcgccctcgagcaggcgcgcaagaacgtctctacccagctggtccgtgccgagcggatgctggagtgcgcccctggcatcccaagccggcgggcgcagtcgcatcatcagatcctgcgcgtatgggtctgtcgtccaaatcagcggcccgaaaagcgcaaccatgatgtaggcaagtaccaccccaccaccaatgcgcacgcttcggttgcgaaggattcgttttggcagactgtcgcgcctttcagcattcgatgaggcgcttacttccgtagtcagagcaatatcggtcatctcatgcaagcctaattcgtgggtcaagccaggcgttgaggacgtctgacacaaaagtcatcagcacaaacatcaccgcgaagacaagcaccagcatctgtaaggtagggatgtcaccggtaagcactgaattcagtgccaaccggcccaatccattcatggcaaagacgacctcggtaacgaccgatcctcccagcttgttccccagttcgatggcgagcacgctcaccaccggaagaatcgcgttacgcaaggcgtggcgacgcagaaggctccagccgaagaacccttttgcccgggcggtccggataaagtccgccgaaagtacttccatcagccccgacctggtcagccgcatgacattcgggaccgcacctttgccgagaatcaccgccggcataatgtagctctgccacgagtcgtctccggacaccggaagcaagccgaggtgaacggcgaaaaacaggatgaacaacagtcctacccagaaattcggggcggcctgtatggcggctgcgactgagagcgcggtgcggtctatccagctgcctggccgcagtgcggcagcgacaccaagtggcaggccgatcaggatggtgaccagcatcccgctcagcgccagtcggatggtgaccggtgcatgctcgaggataatttccatgactggctgcttcatgacatagctgacgcccaggtcaccttttaacagcccgcccacccatgtcacgtaccgctctgaagcgggcctgtccaacccgaggtctgcgcggacttgcgcgattacggccgggtcatcggtatcgccaacgatagccgcggccgggtcgacggcaaagttgagcagcgcaaaggtgacaatcgacgccgtcaaggcgacggcgattgccaacaggatcttctgcgtaacgaatctaagcacgatgtcgtttccctagttcgttcacttctttgccttccacgtggctagatacagccgtggcatgccgtcagcagcctgcggaaaattcagatccggcgccaggacgaagttctgggtgaattcaaacagaggtacccagtaggcttggtcaagaatgcgactcaccgcctcccgcccgagctccttacgtgctgggatgtcggttgtggacaggaactgttcgagactcaaatacagtcgctggtcgtgatggaagtcactgggcgagcccttgccgaacagattgggcaagagcgcgccagcatccgcgacgcccagggagccgttgttctcgaaatatgctgagatctggttttcatcgcgcgccttgagcacagcgggcgatttggcgacgcgcagattggcgttgattccggcctttcgccacatcgcgacgacagcttccagcgtttccttttcacgcgatgcccacagatcaaactgaagtccgttcggataacccgcctcagtaagaagttgcttcgcctttgcgatgttgtagttgtacttggtgacgtcctgggcgcagccgaactgtatcggcaagcagggggtataggcaggagccgaacgtccgcgaatgagctgccttgtcagagcctcccggtccaccgcgtagttgagggcctgacgtaccttcagcttggtaaaaggattgtccttgccggtgcgcccggccgcgtccagcacgatgaagccgatgcgcatggacggcgacgccacaaagactgcttgcttggtacttccaacctcatcggcaatgtccgttggaatgttgtatgtccaatgaacgccgccggaaagaacctccgctacctgagttgcgtagtctggaatcaccttgatgcgaatgcgcgggatttctggcgtgcctttcggggattccttgcgatagccggcaaacttttccagcacgacttctcgtccgggcaggaacgaggtgactttataggggccagtccccaccatttttcgcgactgcgcctcgacatccaggccgctgggcgtccccgctttgtcgtacgttccgctcttgacaacccgacctgtcgttgccagaaaatgcagcgccagaggattcgcgcccttcattctgaacaccacggtaccaggcgcttcccccttctctactttcgccagccatcgcttgaactgatcccccttcttggcagtgcttttgggattgatgatggactggaatgtatagatgacgtcgtcggctgtcactttgctgccgtcatggaactggatgtcctcacgcagggtgacttcaagaacggtcggttcgagatatcggtagctctttgccagcaagggcgtcggctgctgcgtcgccgggtcgatgtagaagagagaatcgtcaatcaggagactgaggatttcgttctcgcgagaggtggagttgaaattgtccaataccaatatttctctcgcgaccgctgcgacaagcgtgccgtctgcgggcttggcgtccgcggcaatcggtgagaaacatccccataggatggagaggcctgccaagctgctgcgaactcgtttcatgctctgtaatccccctgaacatacgattttttgccgttctggtcatactggtatgaccagtgtcgagacactatagtcggggggttgagctactgtcaaaagagggttttcccgcagtggcagcgcccgattgccaactcgctggcgtgtgccgcctatactccgcatgccacctttcatccggagccaaaccatggattacaccccgggcatcagccacctcgccgccctgctcgccgatcccggccgcgcggccatgctgtgggcgctgatggacggcagcgcccggcccgccggcgagctggcgctgatcgccgggctgtcggcctcctccaccagcggccacctggcccgcttgaccgaaggcgggctgctggtggccgagacgcgcgggcgcaaccgctactaccgcctggccgcgccggagatcggcgtggcgatcgaggcgctggcgtcggcgtcgctggccagccagccgccgcggctgcgcgacgtgccggcatcgcgcaccgcgccaccggcgctgcgccaggcgcgcacctgctatgaccacctggcgggcgagctggccgtgggcctgttcgagcggatgacgcattcgggctggctgatgctggacggacagcgcgtagacctgagcggcgacggcgcgcaggcgctggcggggctgggtgtcgacgtggaggcggcgcggcgcaagcggcgccagtttgcctgcacctgc
